United States Patent Application Publication US 2025/0170188 A1 - sequence listing, part 2

SEQ ID NO: 3 - DNA, 4277182 bp, Bacillus clausii (residues 2,138,592-4,277,182 of 4,277,182)
  misc_difference 324319..324418: note = n= a, c, g, t, or u
  misc_difference 452047..452146: note = n= a, c, g, t, or u
  misc_difference 797519..797618: note = n= a, c, g, t, or u
  misc_difference 1297254..1297353: note = n= a, c, g, t, or u
  misc_difference 1321658..1321757: note = n= a, c, g, t, or u
  misc_difference 1593166..1593265: note = n= a, c, g, t, or u
  misc_difference 2155420..2155519: note = n= a, c, g, t, or u
  misc_difference 2178658..2178757: note = n= a, c, g, t, or u
  misc_difference 2584975..2585074: note = n= a, c, g, t, or u
  misc_difference 2607474..2607573: note = n= a, c, g, t, or u
  misc_difference 2803054..2803153: note = n= a, c, g, t, or u
  misc_difference 2803976..2804075: note = n= a, c, g, t, or u
  misc_difference 3295535..3295634: note = n= a, c, g, t, or u
  misc_difference 3297106..3297205: note = n= a, c, g, t, or u
  misc_difference 3335078..3335177: note = n= a, c, g, t, or u
  misc_difference 3927916..3928015: note = n= a, c, g, t, or u
  misc_difference 3995593..3995692: note = n= a, c, g, t, or u
  misc_difference 3995901..3996000: note = n= a, c, g, t, or u
  misc_difference 4067714..4067813: note = n= a, c, g, t, or u
  misc_difference 4068132..4068231: note = n= a, c, g, t, or u
  misc_difference 4148231..4148330: note = n= a, c, g, t, or u
  misc_difference 4148798..4148897: note = n= a, c, g, t, or u
  misc_difference 4187943..4188042: note = n= a, c, g, t, or u
  misc_difference 4189002..4189101: note = n= a, c, g, t, or u
  misc_difference 4190770..4190779: note = n= a, c, g, t, or u
  misc_difference 4191240..4191249: note = n= a, c, g, t, or u
  misc_difference 4191673..4191682: note = n= a, c, g, t, or u
  misc_difference 4192089..4192098: note = n= a, c, g, t, or u
  misc_difference 4193277..4193286: note = n= a, c, g, t, or u
  misc_difference 4193737..4193746: note = n= a, c, g, t, or u
  misc_difference 4194731..4194740: note = n= a, c, g, t, or u
  misc_difference 4203556..4203565: note = n= a, c, g, t, or u
  misc_difference 4203980..4203989: note = n= a, c, g, t, or u
  misc_difference 4209266..4209275: note = n= a, c, g, t, or u
  misc_difference 4210615..4210624: note = n= a, c, g, t, or u
  misc_difference 4221714..4221723: note = n= a, c, g, t, or u
  misc_difference 4222163..4222172: note = n= a, c, g, t, or u
  misc_difference 4223255..4223264: note = n= a, c, g, t, or u
  misc_difference 4224625..4224634: note = n= a, c, g, t, or u
  misc_difference 4224883..4224892: note = n= a, c, g, t, or u
  misc_difference 4243929..4243938: note = n= a, c, g, t, or u
  misc_difference 4244067..4244076: note = n= a, c, g, t, or u
  misc_difference 4244444..4244453: note = n= a, c, g, t, or u
  misc_difference 4244854..4244863: note = n= a, c, g, t, or u
  misc_difference 4270827..4270836: note = n= a, c, g, t, or u
  misc_difference 4272043..4272052: note = n= a, c, g, t, or u
  misc_difference 4272463..4272472: note = n= a, c, g, t, or u
  misc_difference 4272940..4272949: note = n= a, c, g, t, or u
  misc_difference 4275448..4275457: note = n= a, c, g, t, or u
  misc_difference 4275866..4275875: note = n= a, c, g, t, or u
  misc_difference 4276280..4276289: note = n= a, c, g, t, or u
  misc_difference 4276754..4276763: note = n= a, c, g, t, or u
  source 1..4277182: mol_type = genomic DNA
gtaagaaaggaggatggaagtgggaacggccattgatgatttagtggagaaacttgaatcagaaggaaaagaagatatccttgagctcattgaagatgcaaaaaacggcgagcttgaagaaatcgagttggttgaatcgatcggactgcttgtcgatttagaggagaacaagcggctgttaaactggtttgaacaacaaggtgtcaacctcatttatgtaacagatgatgaagagtgaccaacttgccagccggccagttggtcaaaaaggaggtatcacaagcatgagagggcaaccgcaattgcgactgccgagaaaggcgatcaacgtatggcgcctgcaacatgcaatcgatacactgctgctagctttggttccgatcggctactattttgcacaaagatacatatttttgtccttttacgactggctaacatggtggttagcaggagctgttgtaatctatggcatcgtgcgcatcggaatttggccgctcgtgcagtggcgtcgtttccgctacgagatttttgacgatgaaattgacatccaacaaggcgtattagtagtgagacggacgctcgtgccaatggtgcgtgtccaacatgtcgacacggagcaaggaccgattctcaggcgttacaaaatggctacagtttcgataacgactgcggcgaccacacatcggattccaactttatttttaatcgatgcggactcgttgcgcgatcaaatttctaaactggctgcggtgcatgaagatgaatgagttaaagcgccaacatattgctgcaattttgatccagtccgcaaaaggggtttggcaaatcgcggttccttttgccattgttgcgttgttgcagcaaatgctgttttattttttcatcgccttgtgtgcgcttatcgtcatttctgccgttttcagttggctaagttggttcaaattccgctaccgccttgaagcaggagagctatacgttgaacggggcgttttcatcaagaaaaaacgctatatccaaaaaaaacgcgtgcaagcaattcatatttccgcaggtttgtggcaacgcgtatttggacttgtgaaagtaagcatcgataccgccggcggaggcatggaggcagaagctgagtttgtggcggtaacgagggcagaggcagtccgcattcgggctgaactgttaaaggaagtaaaagaagccgatagcagtcaaaacgacggagaacttaacgaagcacaaaatgacatcgaaacggaagccgaaacagaaaccaagccgttagcagtttggcatttgggcacaaggcggctcatttatgcggccttaacgtcaagtggaatcggcctcgtcctttctgcagtggcagcgctattgtcgcaagttggccagtttctatcatttatcccagatgatatatacgaaaatacatttgattatatctttagtttaggcctttttctgcttctcattcttgttgtcgctgtgctgctcctatcatggatcatttcaagcgtgctaacgattttaacatatggaaatttcaaagtgagcacatatgaaaaggaaatggtgattgagcgagggctcattgaaaagcggcaacttacgttagcttaccgtcgtattacggccgttcggattattaaaagcatcattcgccaaccgtttggctttgtttctgtgtatgtcgagtcagcaggcggaggcacgaacaaagagcaaggctccactatgcttgtgccgttaattcacgaacgtgacttgcctgcttttttggagcagacactgcctgaatatgtgtttgaacgcccaatcaaaacagctcctaaacgagcagcgatccgcttctttttgcgaatgctcatcgttccggttgtagccacttgtgtagcaagttattttttcggtgcgattggactgatcggaggaacggtagtagtagcgattgcggcgttgtttgcttggctccaataccgagatgctggagcgggcagcaatgacacgtttatttggctgcgctctcggacaattggacaaacgctcgtcatctcgccgaaacaaaaagtccagtcagtaacgaaacgagtctccttcttgcagaggcggagcaagctggcccattttgaaatatttgtccagtcgagtttggctggcaagtccttttacgtgccgaacgtaagcgatgaaaacgctgatgcgttgtttcagtggtattctcatcaatcagactaatagaggcatacgtaagaggggaacaacgtaacgagccacagtttaaagccaagaacctgacaaaggttcttggcttttttaaaaccgaaatgcgtttgtgtatagggagatggttcgtttgcctttatcggttgtgaactcaaagcggtcgtacacaggctgtccgctttcaaatgtcaaatttcgtttgaaatgatgctgcacaaggacaaaatgttcatctgtttggaatgtaaggaagttgaccccttggaatgaggtttcattttctcgattcaacagttgttccaataaggaattatagcaatgaatcaaatcgcggtgtgaaacatcgtgaagctgtaaattgtattcgaacccttgcaaggcgacagggtcaagttccttgcgcaaaatgtaataagggtcaaattgcttttggtcaattaacataacggaattttcttcagggatatagcggacgccattgtcacgaacaaacacgccatcgccttcatagcggcctgaaacgagtttgccttgttggtgccagacatattcaaaatgggaaggagtcaaataaaggctttcccctttgctgtcaacaagcacatagtggttatcgcgaaaatggaatgtgtattcattataaaagggtgcttcgtcatttccagcgttatggcctttcgtccgttctgtccgccgtttctggctggtcaacgttttgatgtatacttctaacgcctctagttcagctgaaggggcggaaacatcatttttcaagcggatgtagcggcgcttcaaatcagttaaaacggaatccaagtaaggctcaatttgaatttgctgtggccttcttttaagctgttggcttctgaaaaggtcaatatcgccttcgtcgtatggaacttcgtgcaaggcaatcgtatcatcccgaaagatggaatcaggcaacgacaaaacagagaatatccggacttccccacgccaaggctttttcggttctgtaacaacgttgacgagttcgcctaaataaacgccgtcgaccccgagatcgacgataagcaactggccaaccaactgttgggcttccttccggtccatacaatcctcaccttttagcttgttttaaatactgtgctggatttcattatagcgaaaaaaaccacgcttctgcaagcgcggcctttattcgcttcgttggtcgctttgtcctccatagcggagttcctgcaatcgcatcacatgttccatgcgctctatttttgttcgctcaagttcatcttgcaagtggattaaagtaagttccatttgcgataacgaaacaaacacattatcacgctgttcaagttggttctttttcgataaagcgaaataagcgcccattaagttaggaaggtcgtcacggagcaatctcctaacggtgtgtttttgttcaaaaccaaacagttgaaagtcgtcttctagtttttcgacatgggcaaggattcgttttaagcggttgtcgagcagtggatcgattgataatgtgtccattgcctgaacgtaacgtctcgcttcttgggcaagcactttaatatcattggcttgttcccgtttcaactgtttttcctggccatttaagcgatcaagcgagacgtcatctgtcaatttcgttcctacgtacgctaaatcaagacggtgaatgccgtggaaaattccttgaaaagcagggacattgaggagagaacgtacgtgcatgcgcccgtctttcaaataatggattgttgcttcttttattttcccaaccccatcagaagccttgacgtatttacggaaacagacgatgcggagccgtttgtggataggcgaactcgattgttttgtgtctgcaattactagccgaatctgattataggtaattttaatgcgaatatcccaatctttttgccgcctgcggacgtttttgcgttcatttttacctgtggcattgtctgccatgcgttttagtaagcgttccgtatcgttgatgaaattaatagttgtgtcatcttggataatatggtcatcaacaggacgcttatgcgctggcgtaaaaaactcaaccaagcgagatgttgaaaaaaacttcaacggagtcaacctcctgctgctatcgatttaacaatttcgtttgcatttcggaattgagctgatccatttctttaatgaattgttttccgctcgtgacaatccgttcattggattgctccgtcaactcaattgctttaaatacattatcgtatgctttgcggaacgcatcaagtgcaattgccggttcttcaagagtttttaatgtttcctctgtattttgtttcaacaattctgcgttcgaaagaagcatcgattcagtcgcttggtttacgttttgcaccgcagtaatcacttttttctggttggtgagcgctagctgaatcgaagccgttaccgtaataatgtttttcgtcatcgtgatcgcgttgaaaatcgcttcttccaacttctcattgttttccatgatcaagtcgacggaggcgagggattgctgaagaaccatgacagcttgctgcatatttttaatgcgcgtcgtcacttttacttgtccctttttcagctcgttcgaattatcagcccagcgttctgaagtcatttcttgctccaacatctcgtggagttctgtcccaaccgcaatttgattgttcaaattttcaatccgctctttagcaacaacttttaactcttgaagcatgacattgtcttcttgcagtttatcttttccggttagaagcccctcaataatatggtcaacttgtgcttcgactgtttggtactttttggcgtattgctcgattgggtctttctttaaaagtttgtttaaaaattttttgaacgaagaatcatgcaagtagtccggttcaagctggccaacgacttcacgcaattcatgcaattgctttggaagcgtattggcttcgtcattcatcatttgtttgacagggcgcttaagcgcctcgagtgattcgcctgcttgtttttgctctgtttctcctaatgagtctagcttttgcaaaagagtgtgaatatcggtttcgtttttatacacgtctatttcattgtcttgtgcattgttctgttcggtcattcgcctaacctccaacaagtgatcggatttatcggttctagtttatatacgttggataaatgaaatatgtttcagttttctcctttctattatgaacgaaatttccttcagtggcaatttatttgcaggctaaacgacaaaattataagcaaaaatgaggttcaatcttgacggatgccaaaattatcgctaaacttctaacacggaatatttttttaggccgtatcggaatgttcgtctataaacgaatgtatggcgaggcgggcattggttttcgcacatattgttggatttttattcatagtattgtttttatattcgtttttgccttttggagataggaagattcgctgttgatattgctgtattcctttcgtttttgttaaaaatgaacataaaaacaagacgtcaatgcctgtttttaacaggatggttgcataactatgaatttagaagcaaagcgatcgtttccgccgaaaatacagtccggcctttagagagagaagaacaattgaaatggaggaaagggtggtgtctatgcgtaatgtaggttttccacaaaagcaggggttatacgatccggagtttgagcatgataactgcggaataggctttcttgcgcaaatgaaaggaaggaaatctcacaaacttgtagaggacgctttgttgatgcttgaaaaccttgagcatcggggcggacaaggagatgaaatcaacaccggcgacggtgctggcatattagtccagctgccagaccgcttttttagaaaagtgctcccttttgaaattccgacagcaggtacgtatgcagttgggatgctatttttgcctcgagcagaggcagcacgaaaagcgtgcaaacaaaaagtggaagctgtgtttgcaaaagaatcgttggtgcttttaggctggcggaatgtgccaacggatccgtctatgcttggaaaggcagcgcatgactccatgcctgtcattgagcaagtattcgtaaagagcgcgaagcctcttgatcaattggcgtttgagcgtaagctttatgtagcgcggaaagtggcggaacacgaaattgaaccagcacttttgccagaagagtcattttatttcgccagcttttctagccgcacgattgtgtataaaggaatgctgacgacagcccaagtaagtatgttttatttggatttgcttgatgaagcctttgagtcggcgctggcgcttgtccactcccgttttagtacgaacacatttccgagctgggaacgtgcccatcccaatcggtatatgatccataatggcgaaattaatacgattaaaggaaacgtcaattggatgcacgcaagggaagcaaaatttgccggtgccgcatttggaagcgaccttaaaaaaattcatcccgttatcgacaaaaatggcagtgattcctctatgtttgacaacacgctggagtttttgtcgctatctgggcgttctctcgcccattgcgcgatgatgatggtccctgaaccttggcaaaataataaacagatggacgaaaagaaacgggcgttttacgaataccatagcacgcttatggaaccatgggacggaccaacagcgatcgtgtttacggacggagaaaaaatcggtgccacccttgaccgcaatggcttgcgcccatcgcgctattatgtgacaaaagatgattatattgtcatgagctctgaagttggtgtccttgatttcccgccagaatcgattgtaaaaaaagaccggctccatcctggtcagctgttgcttgttgatctaaaagaagggcgcatcattcctgatgtggaagcgaaacaagcgattgtcgaagaaaaaccttacggaaagtgggtcaaagaccatttaattcatcttgatgacgtgctggaaacagcggatgtgtttgatacggaatttgagcgcatccatgaacgccaacttgtctatggctacacgtacgaagaattaacaaaaatgctgatgccgcttattaaagatgaaaatgacccagttggttcgatgggctatgattcgccacttgcagtcctatcgaaaaagccgcagcttctctataactattttaagcagcaatttgcccaagtcacaaatccgcctattgatgcaatccgtgaaaaagcggtaacagctgtagggacgacaattggcgcagagcggaacctccttgagccggagccgctaagttgtcggcatatttatttgccttcgccgattcttaataatgaagaattagcaaaactccgctcaaacaaaatggacggctttaaagccgaaacgcttgacatggtttttgaagcgcaaaaaggcggccaaggcctcgaagcggcccttgacacattgtttgccaacgccgatcaagccatttcaaatggcgcgacattgctcattttaagtgaccgtaatatttcagcagaaaaagcaccaattccagcgcttctgtctgtgtccagcttgcatcatcatttgatccgcagcggcacccgcacagaagttagcttgctagtagagtcagcggagccacgtgaagtccaccatcatgcattgttgatcggatacggcgcggaagcaatcaacccgtacttcgtgttcgacacaattgacgactggattcaaaagcagctcttaacagacttccattatgtggaagcttgtaggcgttacgtgaatggtacaacgaatggaatcatgaaagttctgtctaaaatggggatttcaacgattcaaagttatagaggcgcacaaatttttgaagcgattggcattgatccagagttaattgaccgccacttcacgtggacagcatctcggatagggggcatcggcttctcgacaattgcgaatgaagttcttgcccgccatgaacgtgcttattcacctcgtgaaggcgatgatggtgagcttgaaccaggagatgatttgcaatggcgccgtaatggggaagagcatcaatacaacccccatacgattcatatgctccagcatgcgtgccgcacgaacaattacgagctttacaaacaatatacgcaggcgatcaatgagcaaacagaaaagcagacaacgttgcgtggtctcttccggttcaaaaaaggcaacgccattccgttagacgaagtcgaaccagcagaatcaattgtaaagcggttccgcacaggtgcgatgtcatacggctcgatttcgaaagaagcacacgaaacgcttgcaattgctatgaaccgcttaggtggaaaaagcaatacgggcgaaggtggggaagatccacgccgctttacgcctgatgaaaatggcgatttgcgccgcagcgctattaaacaagtagcgtccggtcgatttggggtcacgagccattatcttgtaaatgcagatgaaatccaaattaaagtcgcacaaggagcaaaacctggggaaggcgggcaacttccaggcgaaaaagtctatccgtgggtggcagaagtgcgtggctcgacggcaggggttggcttgatttcaccgccacctcatcatgacatttattcaatcgaagatttagctgagcttatccacgatttgaaaaacgccaacccgtctgcgaaagtgagcgttaaactggtagctggaacaggggtcggtacgattgcggcaggggtcgccaaaggaagcgctgatggcattattattagcggctatgatggtggtacaggagcagcggcgcggacaagtattaaacatactggtttaccgtgggaaattgggttggcggaaacgcaccagacactgttgctgaacaatttgcgtgaccgggtgacgctggaaacagacggaaagctcatgacgggcaaagacgtagtcgttgctgcgctattaggtgccgaagaatatgcgttttcgactgctcctttagttgtgctcggttgtgtgataatgcgtgtatgccatttagacacttgcccagtcggaattgcgactcaaaatccagaattacggcgaaagtatacaggagaagcagactatatcgtccgctttatgacattcattgccgaagatatgcgtgaactgatggcagagctaggtgtccgcacggtagatgagttggtaggcagaaccgacttgctagaagtaaacgaacatattaacaatgacaaggcaaaacaacttgatttatcgaaccttctcttcaaaccagaatcaagtggaacaaaagcttgcatcaaaacaaaagcgcaagatcataaattggaacagtcactcgatgcaagagagctgctagaagcagctaaaccggcacttgacaatcgcacaaaaataacgtacgcgacgactattcgcaacacggatcgggtagtcggcacgattgtcggtagtgaagtaagcaaaaaatatggcgcaacaggcttgccggaaaatacgatttctttctcctttaaagggtcggccggacaaagctttggcgcatttatcccacaaggcattacccttcggctagaaggtgatgcaaatgactatattggcaaaggcttatcaggtggaaagattgccgtctctcctgccgaaaatgcggcatttgctgctaaagacaacgtgattgtcggcaatacgtctttttatggcgctacgtctggcaaggcatttatcgccggtcaagccggcgagcggttttgcgtccgtaattctggagcgcaagtcgttgtcgaaggaatgggtgaccacgggcttgagtatatgacaggcggcattgttgtcactcttggtgaagtcggcaaaaactttgcagccggcatgtctggcggtctcgcgtttgtctatgatgcaaatgggacgtttacagacaaatgcaaccaaggaatggtgttgatcgaaaacgtgctagctgaggacgagaggctattgcaggctcttttaacagagcacgttgccgaaacaagaagtgaacaagcgcaagagattttgaataactgggagcaagtcaaaacaaacttcgtaaaagttattccaaaagactataaaaacatgataaccgcgattgagagattgaaacagcaaggcatgactgaggaagaggctgcaatggctgcatttgacgaatcaaagcgagatcgatcaaaagtttgacggggtgggcaacctagcccagcccgtcaggtttaacagcagggagtgaagaacagtggggaagccgacaggttttttagaatataagcgggaagcaccacaaaagaaggatccgtttgaacgaacgaaaaattggcaggaattccagctatttatgccagaagacaaactgcggcaacaaggggcacgatgtatggattgtgcaattccgttttgccaagcgggaacgacgatggcaggttcaggagaaattggatgtcctgtttacaatcttattccagaatggaatgacctcgtttatcgggggaaatggcgcgaagcattggaccggctccataaaacgaacaattttcccgaatttacagggcgtgtctgcccagcaccgtgcgaaggttcttgcacggttgccctaaacggcgatcctgtaacgattaaatcaattgaataccatatcgttgagcgtggctttcaagaaggctggattcaaccggagccgccaaaaacgcggactgggaaacatgtggctgttgtcggttctggccccgccggtttagctgcagcagcccagcttaacaaagctggtcacacggtaacggtattcgagcgcgatgaccgcattggcggcttgctgacttatggaattccggatgtgaagttggcgaatgaggtggtcgagcggcgtgttcagcttcttgaggcagaaggcattacctttaaaacggaagttgaaatcggtgtagacatcaccgctgaagaacttgaaacgtcattcgatgcagtgattctagcgacaggggccacaaagccacgagaagtccaggcgcctggtaaagagttaaatggcattcattacgcgatggactttttgacggctaacacaaaaagcctattaaactcgcaatttgcggacggagagtttatttctgcaaaaggcaaacatgtcattgtcattggtggcggtgacactggcgcagactgcattaccacctctattcgccatggggccgcctccgttacccaatttgatattaacaagcaaaaaggcgccatgagaagtggagacaatgtatggccattgtacccgatcatccatacagttgaagatgctcataaagaggcgatggctgtttacggaaaagaccctcgttcttacatgttgcaaacaaaagcgtttttcggaaatcaagacggccaagtgactggcttacagacagtcgaagtaacaactgaactaaaaaacggtcagaaaatcaggacggaaattcctggaaccgagcgtacgtggaaagcagatctcattctccttgccatcggctttactggcccagaacaagaactattgcaacagctcggtattgaaacgacaagccggacgactgtaaaagcgccatacggtaaatatacgacttcgaagcccggcatttttgctgcaggcgacaatcgccgcggccaaagtctcgtcgtttgggctatccatgaagggcgtgaagcagcacgggaatgtgatcgctatttaatgggaagcacacggttgccgtaatttttttagcttttttcctattttcctataggcaaagcaggtggatgcgtgcgataatgaggaaaaaagggacatgtgaaaggctggtgtaggcatgattcgtcgtctaaaaagcatgatgatggtcatgctaacctttctatcttttcatctaccaatatttgatcctttgtttgaccgtgagacaaaacagagagctgatgcaaaagcgctagttcagaaagctgacgccaaagaatatcatttgcttgatgtagtagtcggctattcggatcaatacgaagacattgagctaactcattattggcttacggaacgttttattatggacgaagcgtacaaacaaggcttgcaaaagtttggacaggcaatttcacctaaaattgagcctgcttataaggaactcattatgcctagcttgaaacaagcagtctcacaattgctaagcagtgtacaaatcgatgatttagctgaaatcaccgtttcccacgcaccagctccagggcgcggagagaaaatcatgcatgtttacaataaaaaaacaggcgatgatttgctccgtttccatgtgcggctgaaccgaccgcccaaaaaagggcacgtgtttcaatttcattatcatgtgctacaggacaatttccacggccactatgaacttggaaccatttattggggaaaaaatgagcccccgctttattcagcctaaagtttaaagggaacctccgcttccagttagcgtgaggtttttttgttactagaattgtcgccaattagtagattttcaattcccttatccgctcattctttggtacagtagaggaagagactagtgatggaggaattgttagatggaagctgataaaaaattcagaaagccccgtccattttggctaaaatggctagtccgccttgtgtgcgcctatattgggttgctcgttgtcgtgctagctgccgcgattttgtctatgagtggcacatttttgcttgttgttctagaactatttgttgaaaatgaccgccttcaggaatttaattaccaatattttgtgcctatgtctgagtttctttggaacttattcacggcacttgtgccaggcctataatgggtgcgtcagatctggcttacatggttgccttgctgggctgttttttcgcggcaggcctttttggcggactagcgctccttggagttatgcgaaataaaaggctgttgctgtattggactgccccttgcgccctttgtagcgccgttgcttttttagtgctgatttttcaactcgtttgataggagggagatacaatggaactgtcacaggcaaagtataaatcgggtatttatatcggcaacgtgctagaggtgaggaaggaagaaaatagggcgctgtttcaagtgcttgctgtccttacccatccgaaccaaggggatttgcatcatcctaaacaaatagacgttcccttttttcatgagcggaaagcgcttgcttatttggaaaaggcatgggtgccgttttcgactgtgaaaccgtatgaaggggagctgccagactatggatcatcattaaaagctgcctgggaagctgcttgcgaacgtttgcggagcgacgacagtgactgggctgttaaaagtttgcagctgcttcaagaagttaggaaggaataccgtttttaaaaaaggttaacgatataaaaaagttccctcatacgtacatgagggaacttttttcatgaagaggcaaccgaacgactcgctattggcaaaaacggttcaagcaccgctgcgagctccatgttttccgcttcattaaggccaattagcggcaaacgcaccccgccgcctggtaaccgataacgagcaagcgcttctttgacaggagcagggctcggtgccataaacatcgctttcatgacagggaaaagcttatggtggatcgaggcagcaagctgcagctcgccacttgcaaaagcatcgatcatttgcttcatttcacggccaacaatatgggaggcaacggagacaacgcctttagcgccaactgccatcattggcagcgtcaacgaatcatcgccgctgtataccgaaaagccttccggggcgagacgcagaatctccgtgactttatcgatatttccgctcgcttctttaatcgcaaatacttggtcgatctcagccagcctcaatgctgtttccgcactcatgtcagcacctgtacggcctggtacgttataaagcaggacaggtaaaggagtggattgagccacttgggcaatatgttggtaaatcccttcttgggatggcttgttgtaataaggcacaacgaccatcagcccatccgctcctgtttgctcagctaactgtgccatttgtaccgcctgttgtgtactgtttgcgccgatgccggcaatcacctttatgtttgcattggctgcttcttccaccgcgactgaaaggagcgtttgtttttcttcaagtgttagtgttggggcttcgcctgtagtgccatggataacgaccgtatccgtcccattatttgctaaatggtgtatgagcgtacgtatgccattcacatctaaagcattttcgtttgtaaaaggtgtgaccattgccgtcatcaggtagccaaaatccatgggaatcctcctaaataggtggcgagtagaggcacaaaaaaacaacaatgacagaggctcattgttgcactaggcaaacgggtcgttttccaagtttgagatagccccccatacgttcgtatgacagtgctgcccttattcagaaacagccccaatggtacggcctttgggaaaaaccgcccatttcggcataaacccctttccggctggttcaaacagatcccaattcctcagcagccgtactgatcgtttacgcgcctctactctcacatctgttcaattttatggcttaaccttatcagattttattccggtttgcaaactatttatcagtctttctataacggtgggattccaagcaatttaaaagaacatctagttcctgtgaacattgaacggtttttttagacgtcatgccgtatttgccggccattaaatgcatttcgttgcgtttcacttcaatatcaatataaatcatttttgccactccgcctttacattttcatcttccatttcgtattatagcgaaaatcaagcaagaagaaaaatgcattaacaaaactagtcaaataaaaggaaaaagagtcaagcttcgacaaattgctacgaggggttagccttaatgccatattccgtaataattgactcaaattcacgcctcattaatcgaaacgataaagaagcattgctgtaatgttgttgctcggcctcataggaatggttgtttagcgcctgttcaagctcgcctaagcttaccgtataggaatggtggatatcctcaaaccctccggcaaatggcggcggaaacgtgtttgtttgctcgtgtgcttttgctttatcggcgagaagttctgtaagtgcggctgcttcactgttatttcctgtcatgaccgcctcttgtaattgtaccaagacaggggcagcttcatcaacatactgttcaaaggcacgggcatagtcttctgctgcttttgactgttctttttgctcatgattgacatccaattggctcgagagccctttgattttatcagatgctttgctaggagaagtgccatcgacgcaagcggataaagcaagtaatgcaaataagagagcgacaaacggtttctttcccatttcgtccatcctttctttcattctgtgttgcctgtagtatgtcgcgtaaacacaaaactattccattaagcaaaagcacgtatttgcaaatagcatttggtttcccttaaaataaatgggaaaggagtgagcgcgtgaagttaattgtcactgatatggatgggacgctgcttgatgaaaaacgctctgtatcaaaagagaacgaagaagcgatcaaggcagcacaaaagcaaggcgcggttgtcgcgattgcaacagggagagatctttacgaggcaacagtccctttgaaaaaaacagggttatcattgccgatcattagtgcgaatggcgcgcaaatccatgatgaacacggacgacttctccatgaagccgttctcagtccagaccaagcccggcatgcgatggctgtcttaaaaaatgaaaatgtgtattttgaagtgtatacgaatgaaggcgtgtattcggacgattttgaagcaggccttgccgtagtagtcgatgtcttaaaatcaacaggcgcgaaattgtctgaacaagaaattatgacattcgccaaagaccgttttgacaacggctcaatcaaattgatcgattgttacgaaaaactgcttgaagacggagcggttgtgcttaaactccttgctttttcactagacgctgaacggctcatgagtgcgagagacaggctagagttagacaaaaactttgccgtcagcgcctctgcagcagacaatcttgaaattaccgatgtaaatgcccaaaaaggcattgcggtcgaacgattagctcaatcactaggcatttctccaaaagatgtgatggccgttggcgataattttaatgatgtgtcgatgtttcaaaaagcaggcttggccgttgcaatgggaaatgcgccaggggagattcaaaaacaagctgatcttgttaccaaaacaaatgatgagcatggcgttgcttacgccattcgaaactatgcgctaaaaaaacaatcccttctctaaggggttgtttttttattttgtcatttgttataaaacaaacagaaaaatatattgactgttatgatacaagtacatatactattgnnnnnnnnnnnnnnnnnnnnnnnnnnnnnnnnnnnnnnnnnnnnnnnnnnnnnnnnnnnnnnnnnnnnnnnnnnnnnnnnnnnnnnnnnnnnnnnnnnnngtacatatactattgttatagagagaaacagctttaaaaccattcaaggagtgtgaatcatgagagagcaaaccaaacaagtggaacaagaacgggaagaagagatgaccattctagaaatgattaacgattaccatgcatagggcacacgccctgtttttttttgctctggaatgtgtacctgttgtaatacaagtgggcgttttattttttttgcaacgggaatgggagcgtaagaaggagaattggttgggagggaatagaatggagcagcgccatccttcgaaagaagaactaaagcataaaatcgaggagatgaaggcagaagaacgacaataccgccgcgaagcgtttattgacatatatgaacaatatgtggcgctattggaagacgagattgctcatttaaaatcagcaaagcgaccttagacagtcaatcttgtatgagccatgttgttctatgaacagcgtggctcgttttagttgcaacacgcccgtataatggtaaactgaaaaggagaaaaaggggaataacaaggtcaatgattcgggtaattgaatgtgttcatctttctgtaccaaaaaatgttagggcgaaagcgctgaaaaaggagacgagcaatggacatgctcccattaataggtcatcatcatgtgtcagcgatcacggctgatgctaaaaataatgtagatttttacacaaacgtgctagggatgcggcttgtgaaaaaaacggttaaccaagacgatccctcaatgtaccatttgttttacgcagatgaaaggggcaatcctggcacggagttgacgttttttgaaattccgatggcaggcagaacgtatcgtggcacaaatagtatctcacgaacagggttaagggtaccttcctatgaagcgctgtcctattggagtgagcggtttagtagactaggtgtcacccatgaagggattcaaacggaaggggagagaagcagccttttgtttgaagactttgaagggcagcgtttgttgcttgtggccgacgaacggacagacaacgatggaaaaccatggctgcacagccctgtgccggaacaatatggcatttatggactgggccctatggaaataaccgtttctgatcgaaccgtcacggcgaacgtgcttacggatatctttggcttccgactagaacgtgaagtaagcaaaagcacttcactctacgtgacaggccaaggtggagcaggggcagaaatctatttaaaagaagacacagaatcacataaagaacgccctgggcgggggagtgtccaccatgtagctttccgtgtacaatcaaaagaggaacttgaaaaatggcaaaactggctttcggggaaccgagtagctcattcaggcattgtcgaacgctactacttccaatccatctatacacgtgaccggaatggcattttgtttgagctagcgacagacggtccaggatttgaagcagacgaaccatatgagtcccttggccaacgccttgcacttccaccttatttagaggcgaagcgtggagaaatagaggcgaatttacggccgttgtttgtaaaacgagaggagtaggagacaaatggctgaacacaaacatattttccaacaagcgaaaaatagcgctgctcccacactggtgttgcttcacggcacgggagggaacgagcgtgacctattgccaattgcggagatgattgacgggcatgcctctgttttaggcgtgcgcggcaatgtgagcgaaaatgggatgcctcgcttttttaagcgattggctgaaggcgtgttcgacaaggacgatttacaaaagcggacgggtgaattgtacacctttcttgatcaagcagcagccatgtatggctttaaccgtaatgatgtcattgtaatcggctattcaaatggcgcaaacattgccgctaatttaatgtatgaatacagcaacccatttaaaggggctatgttgttccacgcgatggtgcctcaagaaaaagagtcgttgccttccttggagaagaccgctgtatttctaggggcaggcaagcgtgacccactcatacctgcccctttaacagaacaattgcgagcggatttgcaaacagctggcgcggccactgatgtttattggacagaaggaggacacgagctggctattgaagaaatccatgcagccaaaacatggtacaatcgaatgtttccagaataaacggcaggttactctgccgctttttttgataatctttttctagacaaacaggggtgaacccgctagaatgcaaaaaagatgggcgagaaaagtgaggtcgattgaaattgactacaaaaaataaaggaaaatatcctacaagctcctatatttttgcaggggttgctcttgtagccattatcgttgtagccatctggagcgatatttggtacaaaattgttgtgttagcaagcttagttgcccttatgtatgtgtttattgcaaaaacgaaaaaaattgagcgggaactggaagaaatgaaaagaaagcaagcttcatcagctgagcttgcccgacaggaacaaacggagcttgagaaaacaaaagaacatgatttaaaagcattggaagaaaaggaattccaactgcaaaaattagatcttgaccggacgcggttatttgaagagctattgaataaggccgagctcgaagaagctgagaaatcaacaatacgcgaacgtcttcagcaagccgatacggaaacttcacgaatccggcaagaatggctgactgcgtcgagccggctaatgacgttgatgcgcggcacgaaacgattttttgtgcgtgaatcgccgatgaaagaaatcgctgcttccatcgaccaggacgtattagaaacagggtcgtttacagcattgaacgaagaaattcagcgcttaattccgcgtctttctaaagaaagtgccgaagcgttagcgaaatcagactttattgatgaagacaaccagttaacgcgttccggctataaagcattgttgcaggcgagcgaagacaagcaaacgtaacgacgtttgcttgtcttcactttatttgcggattattgcgacggctagctttcgcccctaagtcaatgacttcaattgttagctcatagtcaaaagaagcattggcaaagtaaacatcatcccaatcgtcgcgaatttgttgccataattttgggtaagccagttgtgcttccaaatagagccgcgccgcatccgctttgtactctttttgcaaccgctccatcatgttcgatgccccgtcttcgaccgtcttctttactgcggccatgcatgtttgcaagtaatcagcggaaaaactttcatcccgtgtgtcccagttttcggaaattctccctgaaaaatgttggtgaatgtggaagtgaaagtggccgttttgatacgttggcttgatctcaggaactttgacttcaagaatttcaaaagtaaggggatcgccattacattcagaaacgacgatgccgccttcgagttccccagaaagccagttaagatggacattgtcttgctcgttcaacaacggttttaatagatggcccttcttaaagatgccagagccgcttaatgaagcactgccgttatcattgacgaccatttgcataggaaacgtcaaatcctcttgcaagtccgaggaaatggagcttaacgtagatgcttttaaaatcgcagacgaatgggtgcggttgccaaacagctcggcaataaaacgagctggaatcgtcgattcgtcgggagcgacaagcacctcttttgtaggctcatttgtaagaagcacgagtgaactgcggcgtacatggtcgtcgcgaatcatttggttaatcaaactctctaacgtccgtttgcctcgtaaaacgccttcattaaaaacagcgatcgactgatgttggctgaacacagggaattccaacgttgtgatatctcggatggcagcgtgaaaggtcgggccttcaccaatgacgttgttatagcttgatgaaccgccttgttgagctggaggcacgatcacttggtttaggaccgaaatgagtccttcttctgtcacatccacaccaatgccaaggtttaacgttacatcctccatattccggctgtcccaacaacctgacaataacaggataactgcaacgtttgctaaaaacaggcgtttcatcggaccaccttcctcttaaccgagtaaatgagaaaatagacaaatggaagcaacaacatcacttcaaacccatagaaacttatcagacggaggatccttgtatcgagcgtatgttgaaaacataaggaaataaccatgctaatagcgacagcaactgccatcccagaaaaagacttttttagctttgtatatttacgaagggaatatcctgacaaaaagctataaatgacgctcgtagaaaaaaattgcatgatccatgtgctgagcaaaaacccttccattctttcaatgaaaatcccctctgtttcaaacgattggataaacgaaatcgttggccatacaagtgttttgacttcccgttcccctaaatttaagacaacgatcaaatacgtaataatgtaaatgatggagataagcacaagcgtgctaaaaacagcaagttttggtttagcttttttgttaacaaaaggaagcaagaaatagattacttcaattccttcaaacggaaaaaggacaccattaggattaaagactacattggcaacgccgttcgtaaaaggcggattcatatgaccgatgtccatttctttaaagctaaacactaaaatcgtccctgccactaaaagagtgagtggaaagataatcgacgagacacgcaaaatcgtttgcaaatttccgcttagcaagtaggcaattaataaaaaagtgagcactttaattagcgatgtcggtgttgatggcagtaagtaaaaacggatcatttctgccatagcggcaatttgatagcttgaagctacccaaaagtaaacgttgattaaaaaaagaagcaacgtgccgccgattttgccaaaagtcatatacccgtaagtataaaggtcagttgcatggtggcggccaatgaagtagagcgctaagcaagtgagaacgaatgtatagagcgctccagccacaatcgttagccagccgtctgttgaatttgctgttaccgttagcacgcgtggcagaatcaaaaattgcacgccgagtaatgtgattgcagttaagacggttaactgtacagtagatagcgtctgtttgggaatcatggctaagctccgctcccttttggctttttaagcgtcctctttttcgataacaacaggaaaatttgcttccatttttggttgtaaaaaaagaacttgcctgacaagtaaggctggttaaagcttgtcagttttgacaaatggattaacacgaacaaaaagaagaacatcacgccaacgagccctaaaatcgctgaaatgataatcgccccaaaacgaaggagccgaaacgataggccaaagctgtagctcggtacggtaaacgatgtaattgtagtaattgagacgataatgaccatgagcgaactgacgatattggcctctactgccgcttggccgatgataacgccaccgactaggccaatcgtttgcccgagtggtgaaggcaagcggatgcccgcttcacgcagcaattcaattgtcacttccataatcaacacttccaaaataggcgggaaaggaatgtcttccctggtggcgatgatcgtcatggctacgtctgttggcaaaagcccatggtgaaacgaaacaaatgaaatgtacagcgatgataggaacacggttataaacaaggacatataacgaaggaggcggagaaaactgctcgcaatccaacgttcataatagtcatctggagactgcaacaacatatcgaacgtagtcggcaaaatcaaggcaaacggcgaattagcgacaaaaagaacaaggcggccatcatttaaggctgcggtaacacggtcaggacgctctgtgctttgcatttggggaaaaggggaaaaaggcgcatcttcgatcaactcttcaatcatgcctgaatcttgaatttcggttgttttaattttatggaggcgatcggtaatatcagcgataatcccttcatcggcgacccctttgatataaaggagcgacaatgttttaatgctctcattttctttaatttggtgctcttctacttttaaatttttgctgttcaccatttgccttgttaggccgatgttatcgtctaagtcttctatgtaagcgagctttggcccacggacgactttttcagttgtcgactcagcaaaacttctttttttaggcgcatgtgtacggagaataaaggcaattgataagtgttcggcgatcacaactgtattgccttcaaaaatggccatcaccatttcatcttgaaatagagtcgttttgcttaatgtcggcgcaagcaaagaacagaaagcggcgtcgaaacgttcggaaccactcagtttctcaatatttaagccgacttcggcaatgactttccaacttatttgtgatccgagaaagaataagcaacatttccgcccataatcaggaatggtaatctctttgctaacaaaatcgccttgttcttgaaaggcggcctggatgttgcttttgatatcgtcatatgaaatgcctatataatctgttgccacaaccagagcctccttcttttactgttagtgtgcaataattagctgtgcttatgcatgaaaaaccccgcctccatagcaggcgggtttttaaactgtagccaaaccttacgttcgactcggctaacagcgtaactgatgtttaataactttgctcaagtttttcgatgagacgtccgacataggcaactgcagctcgaatggtttctttgttttccatgtcgactccggcgattttaaataaatccagtggttttttggtgccgccagctttgagcatgtctagccagcggtcaatgactacttggccgttttgttcataaagggagtacgctttggtggctgctgttaaaccagcagaatacgtatacggataaaggcctttgtagtaatgaggctgcctcatccacgtccgtccggcgcgctcgtcaatgtgaacggcatcgccccagaaaccggagataacctcttgcttcgtctgacgaagcaaaacagcggtcagtggcacgccttcttcagcataacgatagacacggtgttggaaaactccttcaagcaggtgcgtgacaaagttatgataatacgtcccaataaattgcaacagcacccagcgtttcatccgaggatcgtctgtctgcttaagcaagtggttccctaaaaacaattcgttgattgtggacggcgcttcaatgcaatacatcgatgggcgagttgcactgagaggctgatgggcattggcaagataaaaatgccctgcatgccctagttcatgtgcaagaataaaaccaccgcgcatcgtatttttccaagtcagcaaaatgtaagggtgtgccccatatgggcttgaacaaaaagcgcctgtcgctttgccgatattgtcagcccggtcaacccaacggtctgtctttgccctttgcaacatgtcaacatagtcgtcgccaaatacgcgaagtgcgtcaatgatggttgcaaatgcgttgtcataggttgtttctggttcaaactctgggtcgagcggcgcttttaaatcttcaaaacgaagctcagaaaggccaaggacctctttttttagcgtggcgtaacggcgcatatgaggagctagttcctcataaatcgtgtccaactggttatggtacatcgtttcgctgacgtcctgatcgtgaagaagcatggcttcggctgacttaaagcctctaaggcaagcgattgtgacattcttcgacacttcggttgcaaacaatttcgcgtatgtatgttcatatgctttcaacgtctcgtcgaaaacgtgaaacgcatttcttcgttcttctgtattgggcgaaagctcatactggtcttcaaaacgggcgaatgaaaggggcttatcctggccgtttgcccctttaaaaggaggaaacgacatatcagcagctttgctttgtgaatatgtgctgtatggcgctgacaacacaggcgacagagaagcaagggcttcttctgtttcggcagaaagggtataaggctgattcgccaacagtttgtccaaatagacgctaaaccgctcaagctcaggaagggacttacggaattgctcgattaatccagtcggcaatgcaataatatccgcttctagctttgctaatttcgcttggatgagcgcttgtgcttcttcaacgcggcttgcattggcttgagcggcctcatcagctccatttcctgctaaagaaagagaagcataagtgatcaccagaaccgctttttccaatagcgcttctcttgcttggagaccgtttagcaaatgttcagggcgttccccaagtttttcgccaacaggaagcttggcgctttgttcttttacttcggcaagcgctgcttgccatgcttcatcattagggaacagggccgttaagtcccacatttcctctacaggcacatcttgacgtttagttaaatccataatagcctcctatgtttcgttaatcgaaatatatttccattatacatgaatgcccggcctttgccagccatctttcagaatttttttatgaatggttacgtatagccaagagaacaaccattcgctaaaatggggatagacaataaatgaggtggttccatgtttaaacggcgtttgccacagctattgaaccaattaaagaaagatgaacatgtatcttactggaaagaaattgcgccactagaagcgaagacagtgccttttccagctgaattggattttaacatttgccaagccttgcgaaaaaaggggattggtgaactgtatacacaccaagcagaagcctttgaaaaggcattagcaaacaaacattttgttgccgttaccccgacagcgtctggaaagtcgctatgctacaatttgcctgtcctacaggagatcgctgcttctccacatagccgggcgctgtatttatttccgacaaaggcacttgcacaagaccaaatgagcgatttgcacggcatgattgccgatatagggatggatatcaaatgccatacatacgatggcgacactgctccgcaaatccgtacgtcgattcgcaaagcaggccatatcgtattaacaaacccggatatgcttcatgcggcgattttgccccatcatacaaagtgggtatcgttttttgagcacttgcgctatattgtcattgatgaacttcatacgtaccgcggcgtttttggcagccatgtcgccaatgtcattgcccggctcaagcgaatttgtgcatattacggcgctaaccctcaatttatatgcacttcagcaacgattgcgaatccgaaagagctggctcaagagttaactgggtcaacgtttgacttaattgatgacaatggggcgccgcgtggaaaaaagcacttcctgttttacaatccgccgttagtgaatgagcctttgcaaattcggcaaagcgctgttgccaaagtgaatgagctggcaggaatgtttttgaaagaaggaatccaaacgattgtgtttgcgaaaagtagagtgcgtgttgaactaattttaagcaggctccaagaattgacgaaacggacatttaatcgttcagcaatccgaggctaccgtggcggctatttgccgaaacaacgccgtgaaattgaaagagggctccgttccggtgagattaaaggagtcgtatccaccaatgcgttggagcttggcgttgacattggccaactggaagtttgcatcatgactggctatcctggtagcatcgccagctcttggcagcaggcaggccgtgctgggcggagacaaaaagagtcgtgtgtgattatggtggccgcctccacgccactcgaccaatatataatcaaaaatccacactatttttttgaacggccgcctgaaacagcaaggttaaaccctcataatcttgtgatttttatcgaccatttaaaatgtgctgcctacgagctgccgttttcaatgggagacgtctttggcgatgaggtcgttgacgactatttagattacttgacagagcagcatgtacttcatgcaaacaatggcaaatggcattggatgagcgacgcttttccggcccatgggatcagtttgcgctcagcttcacaagaaaacgtcgtcatcattgaccaatcagatgtgaccaatcatcgcgttattggcgaaatggaccgctttagcgcaatgacgctcttgcatgaggaagcgatttatttacatgaaggtgttcaatatcaagtggaacagttagattgggatgaaaaaaaagcgtttgtccgtgaagtgagcgttgaatattttacggacgcgaacctggctgtatctctccgcgttcttgaagaagacgagagtcgggaagagggcgatgtccagctttcatttggtgatgttagtgtgacaggcaaagcaacgatttttaaaaagctacgtattagcacgttggaaaatatcggttcagggccgattcatttgccagaggaagagttacacacgaatgggatgtggttatcgtttaaatccgagttggtagagacaatcggcgaaagcgactttgaagaagcattagtagcattggctcatttgcttcaccacgttgcacctgtgcgcattatgtgtgaccggggtgatattcatgttgtgccgcaacggaaggcgacccattccggcttgccgacaatatttctatacgattcttacccaggaggaatcgggcttgccaaggaagtatatgagcggacaaatgtcattttaagcgatgttgccgttcttcttgattcatgcgagtgcgaatcaggctgtccgtcttgtgtcggcagcgcctcttcagcaaaaaacataaaagttctcgttaaaatgcttgttcggcaattacaaaaggggagtatgactatataatttcacataccgtattaaatggaaggaggcggctatgtcgatcaaggcgaaattaaaacggtttgaatctcatatgtcgaccaccgaaaaagagaagggatcggcggcgaacaccaacgaacaaggaagttgggaacaattgaataccgaggcttgctcgtttgacggtatgatttgttatattcggacgaggcgaatgtctttgcaagaaaaacatggccctaaaacatttgctgaaatgaaagccgcaattgatcgttgggattcgagtgctttagcccatccattgtctaagaagggcattcctactgaaaaactgttgttttttgatacggaaacgactggattaagcagtggggcaggcacgcaaatgtttttgcttggctttgcttcttttacagaaaaagaagtagaggttaaacagtatttgctgtctaaacctgatgccgaggtggctttgtatcacttttttcttgccgatgccaaaaagcttgaccatcttgtcacttttaatggcaaggcgtttgattggccaaggttaaaaacacgccattcatatttgcgggaagccgtgcctgcattgccgaagttcggtcattttgacttgctccatggttcacgcaggctgtggaaaaacgaacttccctcatgcaatttgagtacgcttgaagcagaaaagcttgggatcaagcgtacagcagatacaccgtcctacctagtgccaatgctttattttgactttgtcagggaagggaacccagcattcatggaatctgtgtttgcccatcatgaagcggatatgctgtctttaattgctttgtatgccaagttaagcgacttgattttagatgcaaagaggcaagcgagtgacgcggaacgctaccaaattgctagatggcatgaagcgaccggccagcaacaagctgcgttttctttatatgaaagcttattggatagcaaagattttccccttttagccaggcgccaccttggcgacttattgaaaaaacaacggcgctacacagaagcggcagagcagttccatgcctgtgtgcggcaagggtttgccagctaccattgttggacggagctgtcgcttatttatgagcattatttaaaagaaagggacaaagcggaaatctatgcctaccgggcattagagtcttcttcctctaacaaggaaagggaggctgcgttaaagcgggcaacacgcattagcgggaaattaaaacgataagcatttcccggggaagcgcaatagtcgacggttttcgctgtaaaatgcgcaagcatgcgacgttttttgacttcgattgcaaaacgccgatggctggaggctgtaaaaataggtaatcgaactagtacacctgctgatagtctgacataaggtattagtgactctaatattaaaaggaggaacttactttatgtttcataaacgtccaccgcattgctgcccgccaccaagaccagtatgcaaaccaaatgtaaaacctgccgcagactgtgggtgtgaggcgccaaatttgccgaatatgacgttgccaacgcaaacgcatgagcttccagcagtagtccatccgacgaagcacaatgtcgttgaaagcacgaacgaatacattgtgccagaaatccatccaactcatacgacacatgtcaataaccatgtgtacaaacacattcataaattcccgcatagtgaaagcgtgaaagagaatgtgcaaaatttgcagttctgcgaaaagccgcaagcgacgatgccagcaaacgttatgccgtcaaatgcaaagccaggcaatatgatgccaagcaatgtgatgccaacaaatacaaagccggcaagcacaaaaccaaccgcaaaaacaaaatcagaaatgaagcctagtggcatgatgccatttaatggctacgagtactaaggttaatacgttgggcgggcgcgagcctgccttacgtattgaataaggagggacgagctatccattcactgcttgtaacaggttataaagcccatgaattggggatttttcaggaaagtcatcagggggtccactatttaaaaaaaacgattgaaaaccgattgcgcccttttatcgaagaagggacggaatggatcattacaagcggccaacttggcgttgaacaatgggcggcagatgtggtcttttccttaaaggagactacttatccacacataaaactggcgatattgcctccttttgaagggcaagaggcaaactggtcccaagcagcgcaagaacgctatgcggcaaggttagccatggctgattttgtagagtgtatctcgaagcgcccatatgagcatgtcggccaacttaggcaaaaaaacgattttctagttcaacggacggacggtctgcttgttctttatgatgaagaaaagcaaggttcaccattatactatattgctagcgccaaagctcagggaaagccgattttttacatttctcctgaagaggtcgaggaaacggttcgtcaagaccaatatgacgactttctttaaagcgttgtaaaagtttgtgaattgactcggtttaaattgactttaggcgcgagttttgaaaaaatagaagtagtaacgtggaataggacatgaggtgatctaagatgagccaaatggagattaagctgacagcaaaagaaattttagataaagattttaaacaaagcatgagagggtacaaccaagacgaagtcgataaatttctcgataccgtcattcaagattatgaagcatttcaaaaaaaaatcgagcaacttgaacgagaaaatgaactgttaaaacaagatttaaaaaagcaaacagaacgtccgcaacggagccaaaccgttacgacgccttcggctggcagtaccaattatgacattttgcaacgtctatccaatttggagaaaaaagtgtttggcagcaaaatgtacgagtaatgatccatgtctatacggatggcgccagtgctggcaatccaggtccttctggagctgggcttgtttttataaaggatggcgaagcacaagaatttcgttttcaccttggagacaaaacgaaccatgaagctgaatttgccgcagtggatattgcccttgaactatgcctccaaaaggaatggcaacaagtgtcggtgcgtacggattcaaagcttgtcagtgacagcatcgaaaaggcccatgtgaaaacaaaagcatatgctggctatctttgttccattttggataaaattgcacaactggagcttttttttattatgtgggtgccaagcaaacaaaacaaaaaagccgatgaacttgcacgcttggccattcgtgaaccaaagcggttatttcgataatgattgctaagttggcgcaaatgtgttaaactgaacaagtcgcttatgacagatacatgtcttcagacaaccgctgcgcattttatgtgtagaggaaagtccatgctcgcaccggctgagaggccggtagtgttcgtgcctagttaatccataagctagggcagctgctgtgcagctgacggcaggagagatgcctacgtccaaatggataaggcatgcactccttgaaagtgccacagtgacgtagtctgcttggaaacgggcagagtggaacgcggtaaacccctcgagcgagaaacccaaacaatggtaggggcatttttcagtctgaaaatgaacggaactgaaaaaacgaagcaattcgtagatagatggttgtcgccggagtacgaggctcatcaccgtttgtagtacaaaggtacagaacatggcttatcgatggcatggagatgaacgttataagcgagccaaaaccctttacaagggtttttgtaaatttcccgttcactctgttcaagtaattcatttaaatattgataaacagtcgtgtctaattggtaatttttagagagcaaatcgaatgtttttccttcaacaattgccgggcggagattgcgtccgatcattgaatcccgttggtggacatttaaaaaataaaaaatgccgtcttcggcaaggcggtcttgaaacaacatgagcccaatccggccgacaaccatatatttggatgactttgcttgcatttttttttgtgtgatccgggaagtatttccggtagcagtaaatacttttgtttgcggcagcgtttcctcgctaggaaggacgatgagtgaacccgctacgctcctgaattcgtttttattcacataatcatagccaattgcttgaatgagctgaatgtcttcaatcacttttgtacgaggcgcgcatcctcctagcactaaaacgcagcaaagggcaagcagccattttttcatcgtttgttccctcctttaataacagcaagctttactttttgggcaatgtataagaatgggacgtaagtaataatggtccaaaagccaattgcggctgtcatatcattcaattgattgacttccttacgccctacgacgaaaaaggagcaaacaaacagcaagacaattaacaggcgcaatccggtgcgttgtttgatggagaaggcttggtttgcaatgcggcttgctgcccaaagcagcaagcaaatggtaggcaacacaacaaatagccaaatcgaaagaccaatgtactcgaaccgttcgatgacggacaaattgacgactttccataatgtaatcgtggcccaaatcgtttgattaagttgattctgattaaaatagatagtcgttaacacaattgcaagcgtgtagatgagtgtggttgtaaagaccgctaaatggctccatttttgcgatgtaggaccgttttttaaaaagggataggcaaccaataaaacctcgaagccgagcatattaagcgtcattgctttgctgccgaggagaatggcttgcagtgaatgttcgaacatagggaacagattgctaacattcgcatgtgtaaatgcaaaataatttgccaaaagcaatggggctgaaacaaagaggccaatcacacaaaggccgacaacgacacgcaacccatttgttacataagaataggcaagacacacgagcagcaaaaacaatacccatacatacacttcgacaaacatccacatttgaataatctcgatatacgtacgaatgaccgtgtaagcaagcaaggcaaaatagccgataaaataaaggttcagcaaaccaccaactgcttttccaaacacggctttgtggatcgcgacaaggtctccttgccctcgcttcaatatgccgtatagaagccacacgagtacatggactgtcattcctgccagcaccacagataaccaagcgtcctggcctgaaaacgtaacgataattcgctcaaaaccaaggacgccaacgctgatttgggcgccgacaacgataaaaaagctgaaaaatggcgagagtagccgactttcacttggggcttgagtgtgtgtagctggcatcattggtccactcctttttttactcctcaatgtcgcgcttttttaaatggttgccatcgtggctggagctaaagcgcttgcgtttcttagctcgtacgcttacagggcgctttttctgtttgttaaacggcaacctgaaaaaggagtctttcaaatcagttactctcaacggataaattggtgctaaataaggttgtccaagcgaagttaaaacaagtaaatggcttagaatgagggcgaaacaagccgctactcctaaaaagccaagccactgggcggcaagaataaaaggaaaacgaatcaagcggatcgcattacccatttggtaaataggtgtcgtaaaggaagcaagcgcagtcaatgcaacaatgattaagagaatattgcttgtaagccctgcttcgacagcggctgttccgattacaatgccgccaacgatcccaatcgtttgcccaattttattcggcaatcgcgctcctgcctctcgtagcaactcaatgacaacttcaaggatcaatgcctcaaaaataggcggaaagggaatcccgctccgcgacgaaacgagtttgtgcagcagttgtgtcggaatcatttcataatggtaggtcatcacagccacatataaggctgtcgacaaaatcgaaaacaatacagcacatagtcggataaggcgaaaagcagatgcgagcggccatggcaaaaaataatcttcaaaagcagaaaagaattcaacaaacgaagttggcccggtaagtgcatgaggcgagccatcaacaattacggcaacttttccttcggcaagcatcgctgcaacccggtcggggcgttcagtatcaatcagttgtgtaaaaatcgaattggagtcatctgaaatcaattgcgcgatataagaactatcgatgatttcatcaaagccgatgtcttcaatgcgctgtgttactgtttggacgacttgattatttgtaatgccgtctatatgtagaatcgctacttttgttttacttaaatggccaacgatccgttcggttatgacaaggtctggaatcggcagccgcttgcgcactaagtttatatttgtcgacagcggttcaacaaacgcttcttttggcccaactacactaaactcaacttcaggcgggttaatcgaacgagtttcagcttgctctgctgggacaagcaatgcttctgtcggtgcctgttgaagacaaataaggacttcgccgcgcattaaagcttgttcaattttagctaactgatgttcaattttcgtttcttctactctaatcgcttcttttaccccaacgagtgttttaagttgcttattagcaagaactggcaaaatctgttcatggatgacgttggatttgacgatcgatgaaaaataataaatctcaaaaggattgtcgtccgcctgtttaaaggaatgaaaatcatttgatcgccgacacaagtcaaggagctcttccagcgtcttcgcgcttgaacgtttttgtttacggatttttcgttcgaaacggccttgtttgctttgtttaggcattggcatcactccgagattggcatgtccattagtctgtgttgagccacttcttttatgcatgaaaaagagaatgtggggtgggaaaaagatggataagctcactgttcatggcatgtacatcgtttaagccgggtaatagtaaccactaggcagggcgttttttgattggccatttcacatagattgttcgccactgtggagatgtttttttaattttgacgaaatgttatctggcttctataataaaaaaaatggaagaggagtcgtcagatgtcattatatattgttactaaaaggtatcaaacgtgttatcctgatccactcattttagaaaaaggcgagagcgtccaatatggcgaggaagataccgattacccaaagtggattttttgtgaagcggacaaatcgcataagaaggggtgggtaccgaaacaatttttaacagttccaaatgaaaagggagaggcctatttgttggaatcctatactgcacacgagttgacagttgcagtaggagaacggcttattgttaaaaaacaattaaacggctggctgtttgctcgcactgaaaaaggcgaggaaggctggatcccagctgaccatgcggttaaagcagcaataggcaaaatcgaaagagcgaatcaatgaccggcaagaactaatccagagaaatagtgcataaacaagactgcctggattcgctatgttaataaattggacgaaaacaatagattgttcgttgatagatcccccgtggagctacaggtgtctttccatgcctaatacgtgtagctccaaccttccatcacttccctcataatttcacttaccgtattttacataaaaacaaaaaaacaaacaacactacacctaaaggagtgtccgctatggtcgatggatcgtgggtaaaaataaaacgaggcaatcacacgattatagggtggattgaaaaaaacaaatcctttcattgcaaagaccctttataccaaacttactatttccatacgcttcatcccgaacggtcgaaagcgccgattttaatttattataaagacatacatcaagccgaattaacgttagaagatgaggattaccatgcgatgcaattgctcgcgttggaattgaaagacgccaattggttttctgaaataggggagcggcgaaaagaaatccctttttgaaactcttcatcctataagatattcaacagaaatattgattcatcttcctttgcacatcattccaacaaaagccgtggacaaaaaagcgaatttgcgtaatgataagaagggagagggggatttttttcgtgtattcaattggtttagacataggcactacgagcgcaaaagccgtgctttatacagcgaacaacgaagaaatgtgcgcatgtgaaatcgcctatccattgctgaaacggaaggtaaattatgcagagcaagatccagatgttgtcgttgatgcttgttttacagtccttcaccacgttataaacaaagggcaaatacaaggaaaagatgtttcattggttgccttgtcctcagccatgcattcactcatcgccgttgaccaaaacggcaaaccactgacgcttgcgattacttgggcagacaatcgttgtgccccgtttatgaaatcgttaaaagggacaagccaaggaagacatttttatgagaatacaggaataccgattcatccaatgtcttggattggcaaaatccactggttacgagaaaatgagcgatctgtttttaaacaagcgtataaatttatcacgatgaaagaatatttatgtttgcgattgactggccactatgtggtcgatcattcaatggcaagtggtacaggcctttatcatttacggaaacaagcatgggataaagacgtgttagcctttcttgacattagtgaggctaaattgtcttcgctcgtgcccaccacttacgaattaccgccgctaacagcagaggcacaagcgctgcttccagttggaacgggttgccgtttctttattggcgcaggggatggcgtattggccaatattggtgcggacgcgctagaaaaaggaacggttgcgattactattgggacaagtggagctgtgcgaacacttgtagatgacgtagtgacagacgagttacagcgaacattttgttatgcgcttacagaaggaaaattcatcgcaggcggcgcgaccaacaacggcggtatggcattgcaatggtttattgaccaattttcaaaaggaacgcacacggaagcaaatggacgctctatccatgaaacaattattaagtcagcggccaatgttcctgctggttccgaaggtttgctgtttctcccatttttaaatggggagcgcgctccgttttgggacccagatgcaagagggacttttttcggcgtttctatgcaccatcaacattctcactttgcaagagctgtaatggaaggagtcctctatagcatttgctccgttgtaaacgcattgaagcaatcccttggcacaatcgaccgcgtccaagcttcaggcggatttgctcgctcgtctgaatgggtccaaatgctggcggatatcattggccaagatgtctctttgcctccgtctcaccatgcttcagcgctaggagctgttttgcttgccaaacatgccattggggaactcgatatgtttgctgcagcaaaaacagagaaaaaagagcagggactcctttttaagcctaaccttcagcatacagaagtataccaagagctgtttgctatgtatgaacgcctgtaccaaaaactagaaacagaatttagcgccattgcagcctttcaaagtaagtaaaccgtatttttattatgttaactaacttgaataaatgggtataaatccgttcatgctagccataaaggaggcagactcatgaacaattaccctaaagatgtatatggctacagcgatctcaagcaaattgaacttgccatccaagctgcacaacatgcggttggccaagctacccatagcatggaccctgaccaaattgaaaatgcaaatgcggcattaaagcaagcacgcgaacaatttacacatgcacttgctcaccagcataacatggataacgcttttgcagctcattcatcggctttgctcgaccaagcagcccatcaattgcatgaggcagaagaagacttgcaagactaggcagcgctatatattggtctaaaacaaacaacaaagggaaagaggccccatccaattttccactttgcgacaggaacaagctaaaccttgttgcagtgggggataccaccgacgaccattcacttgaaacaaggataatttgacgtataaagtactttacttcccacgtaaagatttgctatgattgtctaacattcattaagcgacaatcaaaaaaatgcgatgaagagaagagtacaatcaggaattcttcaaagagagctccagttggtgaaaaggagtaaggaggaatggttggaagcaagcctcagagcggcacattggatcccatgtaggtgatagtgtgacaggagctcctgttatagagctagggtatacgtatggacttcataccgtacctaatgaggggaatatggtgacatattgccaaactggggtggcaccacggcccgcaacaactcgtcctcaagacaatagtcttgggggtgagtttttttattttccaaatttagattttcaaaggagtggaaataaaaatgcgtataaaaaagtttataaagtcgtggaaatacccgtccattttattgtctagtattggcatttccagtataggagaatgggtgtattttatcgcattaaatttaattgttcttgaccggatgggcgtaatggctgtctcgggtctatatatacttcgcgctttatctgcattgtttaccaccttttggtcagggagtctaattgaccgattaaataaaaagcaccttatggtatggtgcgctatattccaagcagtgtttattgctgtacttccttcattatcctctctttgggcaatatacggcattgtcttcttaataaatatagctagttccatgtatgagcctacatccatgacttatattacgaagttaatcccacgggaccaaagaaaacggtttaattctcttcgaagcttcatcgattctggggcatttgttattgggcctgctattgcagggatgatgtttatgattggcacccccaattttgcggtatacatgaatgccatcgctctgtttttatcagcactactcacattattcatgcctaatcttgaaaaagatgatgttatggaagcggaagtagaaaaaataagcttgaagatcttaaaacttgattggcaattagtcgtagattttagtcgtaaacacgtgtatattatggtcatttacttcctatttagtggggtaatggttttggcaactgcgatcgattcattggaagcggcattttcaacaaaagtgctttctttatcagaaagagattatggattactagtaagtattgcgggtgttggcatcattgtaggctcctttgtaaacatactcattgttaaaaaagtagctacctcttggctaatcggtcttggagccttgatgatttccgtcggttatatcatatatgctttttcaactatttttttaacggcagcaattggcttttttactttatcattttcaatggcgtttatgaatacaggattttacacattttaccaaaataatgttccaattagcatgatggggcgtgttggtagtgtttatggtttcatcgaggcgtttttcatcattattggcacgatcatttttggaatgatggctgaattcatctctattcgcttcatccttgtgtgcggaagcctccttatgtttgttgtgacaataatattgtttatttgcaatacacaaccatcgaaagcagcatattattctgaggaacatgcagtgcaagcctctgacactaattagaaaagggcaacataagcaacgtcacaaacccccatgccccatttatcatcaggcatgggggtttctttgttcaatagacaaaaatgttgacaataagtcatgacttaattaaagttataacnnnnnnnnnnnnnnnnnnnnnnnnnnnnnnnnnnnnnnnnnnnnnnnnnnnnnnnnnnnnnnnnnnnnnnnnnnnnnnnnnnnnnnnnnnnnnnnnnnnntaattaaagttataacagagtctaaatatctataataaaaggagaatgaccatgaatcagaaattaaatagaaaaataaataatttggagaaaataaagcgtccctctgctgatgagctgtttcagtttatatcccttcataaagaggatacattattagatcttggagcaggagcaggctatataagtcttcccatttctaagtatgtagatgaagtcattgcactcgattttgatgaagagatgttaaagtacttggaaatgaaagcgaaggaacaaagcataaccaatataaaaacgctcgtatcaaatttcaaagatatacaactagatgacgaaaaagtcgataaggcagttgcttccatatcgcttcacgaagtgaaaccactttcgctcgcattaggtgaaatatatagggtcttaaaaagcaaaggcgtgtttctctgtattgaattagaggaggcagagttatcaactggcccgcgagtttcatcggaaaagatgaaagaagaaattcttcgtgctggttttgatatcgtccaagctttttatcttcaagctaaagtggctaatcaacccgtgtatatcattgtggcccaaaagaatgactaaaacttttacccgtattgcaaaaaaggagcataagatcagaaggggaatccttttggcttatcgccgtaagcgggaaagcgcctaaatttcgtagattcaggtcgctacccgtttataaaaagtctatttcgtttaaaacccagctttgccatctacatcaacaaccttgtcacgtttccagtggatggtgcaaatcagcaaaacgtggctgctgaaagacgatcatctccaagtcagcgtcataatcaatggtcatgccgtccaaataccagaaatcatcttctgaaacagtaaaataaagcgagccagattcgatataatagcggttattaagttccttttctctcataataccaactgaaaaaccgccagagccaacaccaccaacacgaacatacaggcgaagaatcgcgcctgcaggcaattccatttctcttttatagaaagaagccgcttgcttcgatacatgaatgttcatttgtttccactcctatccgttgtttagtgtaccatatcgcttataaaatagttgtccaaacgatacaaaccttgctattgtagaaaatagaaaggtggtaataagcaaaatggaaaacgatatccaaaaaaagtttcttgaatacgtaaaaaaaatcaaccactataagcaagcaatggcgcttatggcttgggatagtcgtacgggcgcgccaaaagcaggcgtcccacagcgtgctgaagtgcttggtacgttatccgctgaagtgtttgctatgtctgtgtccgatcagatgaaagacatgctcgctgcattggataaagctacggatttgtcggatatagtgttaaaatcaaaggaacattgccagaaaacgtatgaccgcaacacgaaaattcctgctgacgagtttaaagcgtatgtcatgctgcaatcgacagccgagtcggtgtgggaggaggcgaaggaaaagaacgactttgcgatgttccagccctacttggaagaattagtctcatacaaccagaagtttattgagtaccgtggctatgaaggtcatccgtacaacacgctcctcgatgattatgagccaggcgttttcaccgatacactcgaccgagtctttgcagaactaaaagcagcattgattccacttgtaaaaaaggtgtctaacgctaagaaacagccaaatacagcgccgctctatgcttatttcccgaaggcggaccaagaaaaacttagccacgctgtactaaaacatattggctacgattttgacaaaggacgcctaaatgaaacggtccatccatttgcgattggcattaacccaaatgatgtgcgcgtcacgactaaatacaacgaacatgacttccgcgttgccttgcttggcacaatccatgaaggcggccacgccctttatgagcaaaacatcgatcacgagttcatcggaacgcctctatctggtggcacttctatgggtatacatgagtcgcaatcattgttctttgaaaaatttgtcggccaatcgcttcctttctggaaaaacgtgtatccccttttaaaacaacatgccggcagccaatttgacgatgtcgagcttgaggacttttactttgctttaaacgaatctaggccatccctcattcgtattgaagcagatgaacttacctattgcctacacattattttgcgctatgaactagaaaaaggcctgtttgaagggacaattgaagtcaaagacttgccacatctatggaatgataaaatggaagaatatttaggcatccgacctgaaaacgatggagaaggcgtcctccaagacgtccactggtcatccgggtcctttggctattttccttcgtatgcacttggctacatatacgcggcacaaatgaagcaagcgatgttaaacgatttgccaaatttcgatcaattgcttgaacaagaacagatcggcgttattcgcgaatggctgacaaagcacgtccaccgttatggcagcttaaaaaaaccgcaagaaatcattgctgatattactgggaaatcgatcgacgccaagcctttactatcctatttaaccgagaaatacagcaacctatacgaactttcttaacaacaaaaaagattgccttagccggcaatctttttctttatgctgcttcttgttcaaaagacggaaggatatcggcaaagcccatgacgaccatttcaatcgcaatcaccgttaaggcaacacctgttgctcgtttcaccaacgataggcccttttgccccgtgcgcccacgaagccaattggcaaccaagaggggcaaaagcgataaaacgagcacactcacgaatgctaaaaaggtaatcggcacataaaaccagcggtgattctgattcgccgttaagcacatcgttgcaccggcagcgccttggctagcaactgtagcgaaaatggttttttgcttgctgcgatacctcgttttcccttgcagcaatttacaaccaatcactaataaacatagcccacagccaatcgtaaaggcttcaatggaaatgttataaagcagtaacagccattgttccagcagtaacaacgtagttaaggctcctaaaacaacaaggatggcttttgctgctttatgtattcgttgagtatccccttttatatgggcgagccctagccgcacagagagattgcctatggggtaaagaatcgcaaaaattgaaacgaacgcgtggatgaaaaacgacaccatgccaaacgctccttttttattatgagttagctgctcgtagtttgccctgttttttctcggctatacagctaaattcaaaaaaattagcgttctcaaacaaaagcttccctttgatacgacgatggccgatgagttggaaacatttcagcattcgagttcggcgataatacttttttctaaccacggaaattaatctcgtttaacagtttatcagtggggtgaggacgtgacgaaaagtttctacaacagctgagcgacagtttagggtacaaacggagaagatttaggttcataatggcaatgtgctgattgctgatggtaagcggcatttagccatggtcgcttcctcacctttgcgcgtacgatagaaacggacagtgttaaccagctatttttgtggggcgacgccaatccgttatgaaatccttccttttttaggccatatctcttccattatcaagcctcatttaggataatgaaagagagaggaagccgacttgcgagaaggaaggaggccgttatggacaagcctgtcctattaattacaggcggaagcagtggcatgggcaaagcgattgctaaacagtttgctgaggagggggcatttgttgctatttgtgcacgaaatggcgacaaattaacgcaagccaaacaggaaattgaaacattccctggtcaagtggcgacctatgaagtcgatgtgcggaaccgggccgatgtcgaaaagatggtaaccgcgatttacgaatcgcttgggccattgaccggagttgtcaacaatgcggctgggaactttttatgtccagctgaggacttgtctgaaaatggttggaaagcggtcattgacatcgttttacatggaacatggcatgtcacgcaaacagttggaaagcgctggattgctgacgatgcaaaagggtcgatcatcaacattgtcgccacttatgcatggacaggcggcccaggagtcgtccattcagccagtgccaaagcgggcgtcctagcgatgacgaaaacgttggccgtcgaatggggaagccagtatgggatacgcgtcaatgcgattgcgcctggcccgattgaaaacacaggcggcgttgaaaaactgcttcacgatgagcatgctcatgctaaagcggtaaaaagcatccccctgaaccgctttggcaagacgacagaagtggccaaacttgcttcttatttgttgtctccagacggggagtatattaacggcacttgtatcacgattgatgggggtcaacacattggccagtctggctttcaaacaggcgctgctacttttcgcacataacctcaacccgcaggggcaaccttgcggggattattctttcctcggaagggatgctgtggttaaaaaacataaaatcgggtataaactaaaaagcgcctaatcataagggggagaaggataacgtgattgcctttgagcaagtctctaaagtatatgctgacggcacaacagctgtaaacaagctctcctttaaagtcgaaaaaggggaattctttgtgttaattggcccgagcggctgtgggaaaaccacaacccttaaaatgattaatcgtctcattgaaccttcttctggcgcgattttcatcgacggccaacgtaccgctcaagcaaacattcatgaattgcgctggaacattggttatgttttacaacaaatcgcgttatttccgaatatgtctgtggcagacaacattgggattgtgccagaaatgaaacaatggaagaagtcgacgattgaaaagcgcgtcgatgaattgcttgatttagtcggacttgaacctacgatttaccgggagcgcatgccaagtgatttgtccggcggtcaacaacaacgtgtaggggtggctcgagcacttgcggctgatccggatattttgttaatggacgagccgttcagcgcccttgacccgttgtcaaggagccagctccaacacgatattaaagcgttgcaacaaaccattcagaaaacagttgtgtttgtcacacacgatatggaagaggcggcgaaactcggcagccgcattggggtaatggaaaaaggagaaatcgtgcaaattggctcgcctcaggaactaagggaaaatccgcgcacaaaccttgtaaaagaaatgatggggcacacgatctctcctgggcacttgccactaaaagacgtgatgatgcctgtttaccaaagcgcctacgtaaaagaaagagcgaacacggatcaagccgagttgcaatatgaaatcaacgataagcaggaactaatccgcgctttttatcatggcgttttgcttgatgacccgttgactttaaatcgggacagcacgctttggcaagcgtttgaagctttacaaaaacaaggtgtgccagcccttccagtcacggaaggaaatcacctaattggcaccatttcttatgaagacttggccaaactgagcctaaaaacactttaatctagcactgtctgcgtgcatacaaaatggggaagaactgcaagcttaagcaggacagcgttcgcgcgctttaagcatgcagcaaaaacatatggctaccttttggacatcttatattaacctttttcacgagcgttccgatttattaatacgcgcattttgggaacatattcaattgtcgcttgcttccttgctgattgcagtggcgattggcgtgccactagggattttgcttactcgttataaacgaatatcggagtgggtgatcggcactgctgccgtcttgcaaacgatcccatcgctcgccttgcttggctttttagtcctttttgtcggaattggcacgactccagctatcattgcgcttactgcctacgcgttactgccgattttgcgcaatacatatacaggaattaaaggcattgacccatccctgatcgaggcggcgaaaggaatgggcatgaattcataccgccgtttgctgaaagtagaactacccatcgccatgccaacagtcatggcaggcatccgtacatcaatggtgctgattgtcggcactgccaccctggcagcgcttgttggcggcggcggacttgggcaaatcattatgaccggtattcagcggacaagcaatgaatacattttattcggcgcccttccagctgcgttgcttgcgctagcactcgattttgtgttgcgcttcagcgagaagcgtgcagcgcacgcacaaggaacaacgtataagccgcttgcgagcgtactccttgttgccattgccatcgtcgcgatttcgccgatcgcttcctttattcaaagcgatgaaccagatttagttatcggcggaaaactcggccctgaaccaccgatactcgccaatatgtataaacacttaatcgaacaagacactgaccttacggttgaagtggtcgctcctcttggcgagacaagcgtgaatttcaacgccttacgtgttggagatattgatctctatccggaatttacagggacggttcttagtgatttgttgggaatagaagatttcagttatcatgaacagacatcctacgaacaagcgcgcgatggcctccttgctgaatacggtgacgtattgcttgagccgatggcctttcaaaacacgtatgcgctggcgatgccacgggaacaggccgaacaactcaacatcaagaaaataagcgatttgagcccttatgctactaaactccacgtcggtttcagctttgaattcatggacagacaagatggctatcttggttttgaggaagcgtatgggttttcgtttgaacatgtcacatcgattgacgtttccactcgctaccaagcgatcgccaacgagagcatagaagtaagcgatgttttctcgacagacccgcaacttgtccagtatgatatggttgttttagaagatgaccagtcgttgtttccgccttaccaagcagcgccgctagtaagcaaaaaagcgatcgaagaatatcctgaattggagtcgatcttaaaccaactcgctggacttggttctgtcgaagaaatatctgaattgaactatcgcgtggacattaacgacgaagacccttatcaagtagcaggcgaatttttgcaagagaaaggcctgctgaaagacgaaaaggagtgaacacagatgaaaaacctaagtgatgaacgaattaaagaactgcttcatacgaaaaaacgcattgccgttgttggcttatccgacaatccggaacgcacgtcttacatggtatccgaggcgatgcaaaaagcaggatacaccattattcctgtcaacccccgcgtcgataaagtgctcggtgaaaaagcgtacccatcgctcctcgatattgagggtgaggtcgatctcgttaacgtttttcgccgcagcgagtttctccctgagattgccagagacacagtcaaagcaggcattggcgtcttttggtcgcaattaggcgtcgttaacgaggaagcgtatgattatttgcaagcacatggggttgaaacggtcatggaccgttgcatcaaagtggagcatgctaagtttaaatgagcgcaagcccgcatcagaggtgcgggcttgattttgtcaaacaaggtagccaggcatttgcaacaacaaagataaacatggtaaggtgctattagaaaaaactgttgcatacaggaaaacaatggttaaaatgaagaagggcaagccattatttcacctatacagaacaaacattcgtattcgttatggtataatcgatttatagataaatggaagggagaacggaatggcaaaacagcacgtggaatacaatgaggatgccattcaagtcttagaagggcttgaagcggtacgcaagcggcctggcatgtacatcggctcaactgatgtacgcgggctgcaccatcttgtttatgaaattgtcgataatgccgtcgatgaagcactcggcggctacggaaatacaataaaagtaacgatccataaagatcagagtgtctcgattgaggatgaagggcgggggatgcccgtcggcatgcaccgttctggaaagccgacaccggaagtcattttcaccgtccttcatgctggaggcaaattcggccaaggcggatatgcgacaagtggcgggctgcacggagttggtgcttccgttgtcaatgccttatcggaatggcttgaagtggagattaaacgggatggctatcgatacacacaacgtttcgaacaaggcggcaagccggtcacaacgcttgagaaaaagggcaaaacacgcgcctcaggcacaactgtccgttttaagccagatgaaggcattttctcaaccattcagtttaacagcgaaatattggcggaaagacttcgagaagcggcttttctgttgaaaggcgtccagattgaattaacagacaagcgtccaggaaaagagcttcatgaagtgtttaagtttgatacggggcttgaagcctttgtcgactatttaaatgaagggaaagaagcgcttcatccagtcgtgtccttttccggaagcgccaatgacatccaaatggacttttcctttcaatttcacgatgcctatacggaaaatgtgctttctttcgttaataatgtccgtacacgggacggcggcacacacgagctaggcgcgaaaacagcgatgacccgcatcatgaatgaacatgcacgcaaaattggcgttttaaaagagaaagacaaaaacttagatggatcggatatacgggaaggattcacggcggtcgtctccgttcgcgtcccagaagcgaaactgcaattcgaagggcaaacgaaaagcaagctagggacaccagaagcccgttctgccgttgatgcgattgtctcggaaaatctcagttattttctcgaagaaaatccagctgtggcaacgatgctgcttaaaaaagcgatgaaagcagcacaggcacgggaagcggcacgtaaggcaagggaagatgcgcgcaacggcaagaagaacaagcgcaaagatgtgttgctgagcggcaagttaacgccagctcagtcgcggaacccagcacgcaatgaactatacttggtcgagggcgactctgctggcggctcagccaaacaagggcgtgaccgcaaattccaagctgttctccctcttagaggaaaagtcatcaacaccgaaaaagccaagcttgatgacattatgaaaaatgaagaaatccgcacgattatccatacaattggcgctggcgtaggggccgactttgatagtgctgactgtaattacgacaaagttgtcattatgacagatgctgatacagatggcgctcatattcaagtgctgttgcttacgtttttctatcgctatatgaagccgctcatcgacgaagggaaaatttatattgcgttgcctcctttgtataaagtgagcaaaggcagcggcaaaaaagagcaagtcgagtatgcatgggatgaaaacgagctccaggctgcgttaaagaaagtcggcaggggatcgactgtccaacgttacaaagggctcggcgaaatgaacgccacccagctatgggaaacaaccatggacccagcgacacgcacgttgatccgcgtccgtttggaagacgcggcacgggctgagaaacatgtggctacgcttatgggcgataaagtcgaaccgcgccgtaagtggattgaaagccatgtcgcctttgggttagaagaagacacaaacattttggaaaacgagaatctgcaagtaggggaggaagcgtaagtggcaaaatcagaacgttatctcgaccttcctttagaagaagtcatcggcgaccgttttagccgctacagcaaatacattatccaggaacgggcattgcctgatgccagagacggactaaagcctgtgcaacgccgtattttgtatgcaatgtacaatgaaggcaatacggccgataaaccgtatcgaaaggcagccaaaacggttggaaacgtcatcggcaattaccatccccatggcgacagttccgtgtatgaagcaatggtccgcatgagccaagaatggaaagtgcgtgaacaattaatcgacatgcacggcaacaacggttcagtggatggcgatccaccggcggccatgcgttatacggaagcgcggctatcggcgattagtgcagagttgatgcgtgatttagataaaggcacagtcgactacatcccgaactttgatgattcaattgaagagcccgtcgtcttgccggcgatgtttccaaatttgcttgtgaatggttcaacaggtatttcggctggttacgcgacagacataccgcctcatcacttgccagagatcattgacggcattacgttgttgatgcaaaagccacatacaagccttgatgaattgttagaaattattaaaggccctgacttccctactggcggaattgtccaaggctcaaacggcatccgccaagcttatgaaacagggaaaggcaaaatcgtcgttcggggccggacagcgattgaagaaacgcgtggcggccgcaagcaaatcgtcattacggaaattccttacgaagtagtaaaggcgagcttagttaaaaaaatggatgaaatccgatttgacaaaaaagtggacggtattgccgaagtccgcgacgatacagaccgtaccgggatgcgcattgtcgttgaactgaaaaaggaagctgatccagaagcgattctccattacctgtttaaaaataccgatttgcaagtgacgtaccactttaatatggtggcgatacacaataaaacacctaagttaatggggctgctcgacttgatgcaagcgtacatcgaccatcaaaagcaagtgtttacgcgacgctcccaattcgagcttaaaaaagccgttgaccgtgcccacattgtcgaaggtcttatgaaagccgtttccattttggatgaagtcattgctgtgatccgtgcttcaaaagataagaaagacgcaaaagccaatttgcaaagccagtttggctttactgaaccacaagcagaagcaattgtcacactccaactttaccgtctgaccaataccgacattacgacgcttcaaaaagaagcagaggagcttgaaaagcaaattgccgaattaaaagcgattttggccagcgaaaagaaactcatttccgtcattaaaaaggaattaaaccaaattaaaaagacatttgcttctccgcgccgaaccgaaattcgagcggaaattgaagaaatcaaaatcaacatggacatgttgattgcctcggaagacgtgcgcgtgacgatcacaaaggcaggctacgtcaaacggacaagcctgcgctcctactcagcctctagccaggatgggccaggaatgaaagaaggagaccgtctcttattatcccaagaagccaatacaactgatgtggtgctattgtttaccaaacgagggagttacttgtacgtgcctgtccactcgctgccagacatccgttggaaagacgacggccaacatgttgccaacctcgttgcgattgatgccgatgatgaaattattgctgcgcaaatcattcgcgagtttgctgagacgaagtatttgctctttatgacgcgagcaggaatggccaaacggtcaacgttaaacttataccaagcccaacgttattccaaaccactgatggccttaaagctaaaagaaggggacgaagtcgttcgcgtgcttttgacagacggccagcaagaactgttcgtagccactgcctttgggtatggcctttggttttcggaagaagatgtttctttagtcggccaacgtgccgctggtgtaaagggaatcaatttaaaagaaggcgattattgcattggcgccgaagcatttggccttgaagattctgttgaatttctcgttgccacacaccgtggagcggtcaagaaaatggccattactgaatttgaaaagtcaagccgcgccaaacgaggcgtgttaatgctaagggaattaaaaaacaaccctcatcgattagttgggctcaagcgggtccgctctcaagatgaaacgtttgctatcgaaacggcaaaaggagacatgattgccatctcgccaagggactatcgccgtgctgatcgctattccaacggctcctatgcttttgaccaacacgaaagcggcgacgcgcttacgttagtacgtgtgattcaataaggaaacctcaaagccttgaagcatgagcttcaaggcttttttagtagactatttttcttttttcagcttctttgtgtagcgtctcatttccgtaaaatcttcgccattgcttttccctttgctagctcatcgatcaacttatccaaataacgaatttcccgcatcgttggttcttcaatgtcttccactcggacaccgcagacgacgcctttgatcaaatggcgcgaaggatttagctttggagcgtctgcgaagaatgtctcaaagtctgtttgtttttccagttgcgcttcgaactcttcttggctatatccggtaagccaacaaatgatttcatcgacttcggttttggtgcgcccttttctttctgccttcgccacataatggggatagacgctcgcgacactcgttgtataaatccgatgtttggccatcatgcttcctcgcttacggtttttctttattttagcacggaacatagtcgaacaacacctagggaatttaccaaatatgagaaatccgttgtattggtatggaattcgggcaatgatgcaaatggcttccgtagccagccgttttgccttcatctacaacattgtgaatctgccaattgccccctcattgtttgcctaaccgccttttcgggaaaggagcagtataaggatgtagagggaggtttagtaaacatgggactttcagagaaacaacttgctcatttaaaacacaaattgctagaaatgaaagacgagcttgaaacaaagaagcgacgaaccactggcgaaatgtcggacagccgcggcgacattgcccggggcgccgataaccatattggtgaaacggcttctgaatacgaagaccgtgtcatccaacaatcacttaacgaagcggaccaaaaacgccttcaagacatcacagaagcgctagagcgaatcgaagaagggacatacggaatctgcatcgatacagggcaaccgattccttatgaacgtctggaagcactcccttatgcgaagcgaacaccggaagcgcaacgagaaaaagaaacgtttttagcggaggatcgtcaagaagctagtggagtggactatgtgcgaatggagggcgatacagagacaacgcgtgcccttgaacaagaacaacaggcaagccatcaatcaggggaggacgcgttctcccattcaacaaatgaacaagattggccaaagcaatagcccgctcatcggagcgggctattgctcgggttcagtaaaaccgttgcggataaactgaaggacggctcgaaaaaagccaatgtcattcaaaattacgatgaacaccaaaatagcagggcctaaaaacaagccgaatgcaccgaacaagcggaggccggcaaacaaagaaattaagactgcaattggatttaagttcatatgacttgaaagtacttttggttcaagtagttgccggatgatgacgacaatgatgtataaaatcgcaatcccgaaaccgccagacacatcgcctgtgataaacaagtaaataaaccaaggaattaagatcgtgccagtccctaaataaggaagcagctcagcaattccgacgacaatggcaagcatccacgcattgtcgatctgaatgatcaaaaggccgacaaaaacaatacaagcggtgacaaacataaggatgaactgggctcgaagaaagccaaacagcctccgccggatcgcttgtacgaactctttgccttttttacgcaaccgtagtggcacatggcgatcataaacatcctggtagtaactccagcttttccccataaaataaatgctcaaaatgataaacagaaacgccaccaaaaagttcggtaaccctaagagcgctgttgttaaaaagtcaacaaccccctgcccgatatcaccaagaaaattgccaagcactgtccctaactggtcaattccttccgacagaacattgtgtgtgcctacatcgatcgtatcaaacaagccaagtacttgttgccagtacggccaaatcgtctcattaaagaagatttgcattttttcagagccttcttcaatccacgttggtacttgctcaaaaaattggcgcaaactaaaataaataagaaaaaccaaccccgttagaatcgcgctaatgaccaagattccgccgagcaaaccaaacaaactggcaaaaccacggctgaagcgcagctttttttgaaagaaacgggcgactggttgtagcatccaggcaaacaaagccgcaaaccaaaaagggtatgtaagtgagaagacctttgcgaacacccataaagaacctataagaaaaacaacaatggcaatcgttcggccaatcatccaagcaacgtctcgcgacaacaggttcaccttcttttcatgtaaacatcgccaaaacaggtaacgagattattgtagttcttgacaaagcatgctgtcaaatgacacctaaaaaaacggagtggggcggaacccactccgttttttattcgattggttccaacgggagaacgaggacttccacgcgtcggttggcttgccttccttcagcagtctcgtttgaagtgatcgggtgatactcaccgtaacctgcaaacgacagttgcgccggctcaaaatgatcgtattcaaaaaacagtttcatgacattgtaagcacgggcgctgcttaattcccagttcgaatcaaattcgttgtttcccatcggcacattgtcggtatgcccggaaatttgaatatagcgaggtgggtcagaagcaagcatagctgatagttgctcgattagttcgatcgaatcgctcttaagctcggcactccctgaagcaaacaagatgccgtcattgatcgtaattaacaatccggaagcaccaagttccgtttgtagccgatccgccaactgcttttcttcaatatacccatttaagcgtgcctgaagctgttccaattcacttcgttccagttttgaggcttcgcttaattcagaaggatcgctttcaagtgtattccgcgcctgttcatccacttcgtccagggcattttgattatcaagaatcccttgtccgccaagcgtttcggaaagcacaattttgagttggtcatacttggcttgatcaatttggcccatcgcaaataggacaataaacaaggcgacaagcaaagtaagcatatcggcataaggtagaagccatgtttcgtctacatgtgtgttactgtcatgccgcctaggcctccgcttgtgtgacatgtcgttgttctgctccttctttgtatgctttttgcttcttttcctccatataaaccgacaaatactcttcaaccgcccgaggcgagctgccattaataatggcaatcgtgccttcgataatcatatgctgattcaatacttcaatttttgacttacgccgtagtttattggcaaatggatgccaaagcacatagccaaaaaagatcccaagcagtgttgcaacaaaagcagctgcaatcgactcgcctaatttgttaatgtcatccaaattgccaagtgcagaaataagccccagcaccgccccgagtacgccaaggcttggcgaataggtgccagcttggctgaaaatggccgctcctgttgcatggcgttcttgcatggcatcaatccgctcatgcaatgtatggcgaataaagtcagggtcctggccatcgatcatcatccgtgttgcctgctgaaaaaacggatcgtctatatcttcaatcttgctttcaagggcaagcatcccgtcacgacgagaaatggtcgcatactctacgaacttttccacgatttcatgctgagaggtttctttccgttcagacagcaacacgccaaacaattttggaactcgtttaatgtctgaaaaaggaaaggcgattaaaacagctgcaatcgtaccaattatgatgatgacaatagcggcgggattcaggagcacctctaagctagagccttttaaaatgactccaaatataactgtacctattcctaaaaaaatgccgataaatgatgtcttgtccatgtgagtctccttttaaatctgtccttactacttaattcggataaagaagcccatgcttgaagcgctcttcgcaatttcgtcaatctgtcactcttttaagccgaaagtctcattttacaattgggtccttttgcataaaaaaattcaattttgtccatagtaatgagatggagggactgtctatgccagcttcacagcaactgagctttcgaatattcactgtgatggcaggtgccattttagccgctatagcgattgaatggttcctattgccaaacagtattatcgatggaggcattatcggcatctcgttgattttaaatgcgattacatcttttaattttggcattctcgtccttcttttaaatgtcccgtttttatattttggctttctctacctcggcaaacgttttttaatctattctttgactggaaacattatcctcgctgtatcagaatcgcttttgcatcattggcatttagaacctctgacgacgacgcctttgctagcaaccatatttggcggactgctattaggacttggggtagggttggtcattcgaagtggaggcgcgctggacggcacagaagtattaggattattgttaactcgtaaaattccctttacagtcggtgaatgtgtactcgcttttaacgtggccgttttcgcttgggctgcttttgtgtatggcttcgaaaacgccatgtactctattctaacttattacgtagccgccaaaacgatcgatgcagtggtagaggggcccgaccaaacgaaagcggtcatgattgtctcggaccactatgaacaacttactgaagcaattacggcgaaactgggcaaaggtgtaacaaggctaaaagggcaggggggctatcaaggaaaagaaaaagacatcttgtacgtggtagtaggaagactggagatcatgcaacttaaaaatactatctatgaacatgaccgaaacgcctttttcaccattatcgatgcccatgaatcgagaggggctgcattcaaaggagaagaggaccattaaaaaaagataccggtaaaacggcacctcagcctgtagaaaaacacctacgttttctacaggctaattgttttacagatttcaggcgaagcttctccgtcacgaagagttagaggaatttgatgtgaccactatcgtagtcatcgctacaatcattgctgtttccatggcatcaattgtctttttaacttcagcagagacaggtaagtctttgctgatccgcttcaaatgcgctgctgcttctcgtacctcagctcgttttttaaagataataggcaaaagcttgctcgtatgcaaaaaggcaagcaacactgcgtatcgttcttcttctcggttgaggggctcttgactactcattttatccaacaccgcccggaacaaacgataggcgtgggcgtgtaagtcgtttcgttctaaatggtattcataacttggaaagaggcctagaaaacgtgttttacgaaccgttagctggtcctgttcctcaagcaatgctgccacctcttgctgagtgcgggaagaagagaggccttgcacccaatacttgagagagcgaggctttttctccttcatacgtgcaagtgtttgcttaagcaaaggatcattcgtattttcattcacaacaactgctttcttatgttgtagttcaatattgccattgatcatcaattcagccaatagggcgccattaagcgcataaggcagagccgtcgaagctcggtaataaggcttcgcagtttgcggattaatcgctaatagcaacaattgctcagcaataaaaggcaagtcccatcactcctttttattatctatctcttactcttatttacgagccaacacaaaaaaagtttcgttcccacatcaacaacgagataaggataaaccaaaaatcaactggagtttgttattggtagtatgcaggacttgaaaaaaattataaaattagaacagctaaatgtaaaaagcagggatgcttagaatggggaggatgagatgaacacttcaaaagaattaaaaacgtgcgataaaggacacaaatattataaaagtacagattgtccaagctgtccaacgtgtcaacaagaaagcaaaccaagtagcggatttctttcaaagctttcttctcccgctagaaatgcattgatacacgagggaatcacgacattagagcagctatcacgctttagtgaaaaggaaattttaaagattcatggaataggaccagcatccttgccaactcttagagctgcattggaagaaaaacaactctcatttaaacgttaaattgtagtgaacttctgaactcataagtgtatgttgaacttcaaaaagtgacatgataagattaatacatggatttaaagactactgcgcgctgctttttcataaaggtgccttgttaaaggatgcccacgggatactcatccaacaaacagagaacgtacaagcggcccgccaaattcgctttacaaatattgaggaaatcattgaaaaagagcttattttaaaagactatatagatgaagcaattgcagtagagaaagccggattgaaagtaaatcaagataataccaacttgaacattccagaagagctgcaaaataaattcgatgaaatgcccgccttgaaaaccgcttttgaggcattgacgccaggaaggcaacgagcatacattctttatttttctggtgccaagcaaccaaaaacacgagcagcaagggtggaaaagtacgtccagaaaattctagatggattaggattgaaggattagttaaaaggtttattctatgaatgtatatgtatttggaaggtttgttgactcttgttatagatacttgataatatgatggcatgaaattgcctataaaaaaggatgactgtcatgaaaaaagcagtgaaaatagcctcctaagataaatttaattatattatattaggaggcgttgattatgaaatttaacactattaatcgtgatacatgggatcgaaaagaatattttgaacactatttacagcagcagacaacattcagtctgacgaatgaaattaatataactatacttatgaagaacttaaagaaaaagcattataagttatatcctgcgtttatttttatggtgacaaaaatcgtgaacgcccatagagaatttagaataaattttaactcagaaggaaatttaggttactggacggagatttgcccactctataccatttttgataacaaatcacacacattttctggcatctggtcaccaaacttaactattttttctgagtttcattctaaatatgaaaatgatgcagaaagatacaatggcacgaggagattatttccaaaaaaaccaataccagataacactattccgatttctatgattccttggagttcttttacagcatttaatctaaatataaataatggcggagattttctcttacccataataactggagggaagtattcacaagtaaatgatgaattattcctgcctgtctctatccaaatgcatcatgctatttgtgatggctaccatgcaagtgtttttatcaatgacttacaaaaacttgctgatgaaagtgaagactggatttaactggtcgttagtggatgaatcgtattattaaaggaactgtgtgcaacagttccttttaatttggtttctgttggacaaataattaagatatgataataagtaagtgattagcgctagcaatgaaaagattttttgtctcgaaaactgaagtaaacttgtcattcgagacgatctttctttttcatccaattggttcctgtaatgtatattatgtaaactaacagaaacaacgtattgaattgaacgggtttaacaaatactttgcttccccccgaacccgagccctcattgacaggaacagcgagcatttgttgtacttaagatgcccgccgtcttatcttagaaaggataaacaatcattttagtcagcttctttcaattgccatgcgatcactttcccgactgcttccgctgccgcgaatggcgttacttcactcgttggttgttcctgctcagcttttagacatacgatcatatcctgatccaaccgagaaggatcgagccaagatatagcccaacaagcccagaatttcgttaaacctactgatttcttggctgtctcttccaataatggtagactgtcagggccgatgcgcatcaacgagagagctgcggccatccttgtctcctcagagcttgtttgcatcagctcgatcagtttcggcactgcctctcctgcgtctgaacctagctctccgagaacggcacatgcaatgtcacgcaacatcggatcctcaccatgaagcgcatctatcaatagtggcaaagcggctttaccagaccgcctcacttctttcatcgccgcagctacctggttcatttcactggaattcgcaatctttctaagcgatagagatacttcctcgttcttgtccatagagacaccatccttttgtattacatattccgcctcaaaattacaataacattatcatcgaaaatacagcagtgagcgatgggttatacccttgacctgccgcagtttagtgaaataggtgatttattactttatatcgctctcagaatagtaacttactaatttaccttgttgttttgcatactcaatttctttttttgtgctttccccaatatagccattaacatcaatcacaaaaatttcgtcggacatatttattttttcataatggattttctccaacaattctgcttgctcttgtgtgatttttataccttcactttgctcgaaaaacccgagacttatcacaatatttccttgcaatgtatgataagcatttgctttctcgaattggtccttaaattttgtagagccacataaagtaattactttcattaagataacctgctttctactatccatgtcatatgtatggcaaaggcgtctaacgtacatccactactggctttctaatatgcgtattcactgtatgtctacccgctttgatcatgcagatgcaggtaacaaatccagatcaatcattttcttcgtttgcatatagagcctattcccctattttcttttacttctacattgcctctccattccctcttctctctttaaaattcactaatctgtgcatttggacaccgttttctcaactcggcaataaatttcaatttatcctttggtaatatttttatcgttctagtagcattggctgttttgtaacgcaattcaattcccttatcagacgaagaaatttgataaccggtgaatcgagcagttgttgggacgacttttattatgtttgggtacaatattttacgtttaaatggacctcctttaattagaagatgttcctctgtcaaaacaaatttaatggaggttatataccacaagagaaagccaactgtaacaataaacatcgcaaccgaaatgaaaaaaataagggatgaagacacttctccgagaataaaagtgagaggaaaaacagccatcgcgaccatggcgcctaccaataaaaatataaatataatcataggaacaatcgctatttttgcatgaaaaaccattatttactcacatccttgttaaagtacatgtatgctccattgcccatttctacaaagcgccattcaccctgtaacaaaaacgcagacacaattcgataatagacatctggacattcggcatggggagtatgcccacaattgttcatcaccactttatgaccgtttgccatttgattataggcttccacatgtttatcgcatgtgactgggtccgcgtcccctatcacaagcaacgaaggaaccgaaagactgggaagcaaggagacgatcgattggaagatccttccctcttctcgtaaacgctcaagatgaatgtccgttcgttcatcaaacgcctcccattcttcatccgtatatgccgaataatctattgaagtatcggcatttacccggtaaatatcctctttatgttcccctagctcctctcctaggcgtaaatacgaatcaaataggtgctcacttgataagttgctggttgctagatttagacattcctcggatttcgtttcgattcctagctctaaaaagacagaagctgctctgcgcaacaaactttttgccgtccatgcaaagtcaaaggttggacattcaaaaacaacgtttgtgatagcgtttggataaactgaggcataaagcaaagcaatatacccaccaaacgaatggccaatgactgcccatcggttaatgcccagttgtttcctcaaatcctcacagtcttccactaaatcttgaagcccgaatggttcagtttctgataaaccttccgagcggcaaacccctctttggtcaatcgctaccaattgaaattgatctgaaaaacggttggactgatgataaacaaattcgtagcagctttctccaggcccgccatgaagaaaaagcacagctggtagtgaccgatctccgaaaatctctacatggatttttttgcctcgtactatatatgtattcatgattgtggctccttcttcacatgcaatcattcgtattgtgtgtcctatacttattatttgcggtgaaaaggcccgagtcaataaaattagcggatataatcacaacatcagattatcaaattaataataaaagataccaagccaaaaacaagataatctgccttagccgtaaaaaacgagataaaacggatgcagttgcgggatcaataatctctttaactcctttttaaaatcttccctggccatcatcgttatggcgtcttcttctgtcacaaatttaacctctatgctttcctcacttgttttaagcttcgaggtggtggcccttgccaaccaccatgtatgacaaattgccttgtttacatcctgactgattccacaaaacggaccaatctcaatttccaccccgctttcttccatcacctctctttttaacgcattggtgatcgattcgccttcttcgacatgaccgccaggcagttcccatcctcgcttgggatgcttgacgagtaagatgtgattgttttcattacgtactaaagctcctgcagttaatcgatgtttaggtagcatatctaacctctcctatatactgaaggtaagaacttttatcattgttctgttttcgggtattatacgtcaacgacttccatccatcccttcaaatatatacaataattatacgatacttcatagggaaagcttccgatataataggtcgttccgacagaggtagtaacgataagcaaactgctgcagctcaggaagcggagtattttgaacttggttcaggcgatttacagcaattaggacgaagcgatgtgtagcaagttgctagtggctcttgcggatcattgcatcactgttatggaatataggtcttctatcaagtaagcgggggcaggctaacttgtaatgcccccacatcatgattgcttaccgaagttctccgttctagccctttgtgcccgtgttgtcatcgtttcgtcgcttttgtatctggtactgccagccatgcatgacatacttgaacgatccaatccggctgcgactttgcggcatcattcaaccaattggctactgaatcttggacatacttagatggatcagctttcaatccctttaatgttagttttcttagcttttcctttacaaatcaatcttttacagagagagtaactgcccctttctaccattctactgccttttccatagctttctgggcatccgttttgcgaaaatcaaataaagcagagtggcggttggaaaattcagcaggccaatcattccccataaccagtaattatggccgtgccgcctggcgttaataaatagaaccgtactttgcgtaaataaaatagcggctaagattacccatagatagaaaggaacgtcagaaggatgcgtgttcgtcatgagcgtttgttcacctcttttttcgtcgtaaaatatacgatgaacggcagtataacaacagcgatcccttgtaagatcaggaagaccgttggcgaatgaaagtaggttgttgtccaaagcgctaaaataacaagagcgagcccccacaatcccactagttccttaagcaactttttcctgctattggcttttgtttcctttacttgctgtaggaaaaaagaaaggtctggctcatccgctgcatcgagctgatcaagacgttctaaacccgaacgcagctcgataatcgtctgtttgtcggttagctgtgctgagggccttccgtttttccccttctcttccgtctccgatttattctgcctcttatccttcgtcattcacgttcaactccttccttaacagacttaatgcgtgatgaacccttgatttcacagttccttctggtatgcctaacatcttgcctatttcttcatatctatagctgtaatagtgcttcaaaatcaagggcagacgatacccttctgataatttccctaactcatctacaacatccatccattcaagctgacggtgggcaaattcccacttcaactggtgcaatggcgtttctgtatctgccattagttcctctttgctctgcttgcggcacatatcaatatataggttagaagcgatggaaatcaaccatgttgaaaacttagaacgccctttataaagatgaattttttcgatcgccttggtcatcgtttcctgtgttaagtcatcggccaatgatggtttcaatgtaatctttaacgcatatctcctcagaaataaataattctcgtgcaggagagtagctagcgccacttggtctcccttttgggctttacgaataagtgcagtttcatccatagcatgtctccttaaacaaggcagatcgttcctttctatcatgctcattgatactgaagctagtcaacaagctctttatgtgtaaaaatggcgattgctccaagctgcaagccgatgatcccaaacaaagtcgacaacaaaacaggtgtataatcagccaaaccctctccttccaataaaaccaatgtggcatgattggccaactgtgcaggactccacgagaaccaggctggaaaggacgatgaaagcaggctgatgagaagaatggtacctaatgcacaaaaggctgctgcgcctgtttgtttaagaatggcgctataaaacagaacaatcgtcataaccaacgttaaccacaatccaaaatgaaaaaaactactgacccaacgttcaagcgaaaccgcatcgaaaagaagggtcgtgtaatacatcgctaacccgtaaccaaggccaagtgacacccacgtaaaacaaataatcgccgcccatttggctgtgagataagaaaagtagggtactggcttcagtaaaatgatcgcagctactccgctccgccgttcagccgatacaatccccatcaacgccaacgtcaagacaaggacgccgagcaatccgaaatcagataacgtttgcgcgagcacctcagttcctgttggcgttggaatgtcgatgacggccccttctggtaacccgccgaagtcctctaagatttgtggcataaagtaggtagagagcggcgtcgaacttcctaataatagaaacacaacaggaacccatatccacttgtaattcctccatagttctacctgttctttttgaaacaacacgagccattgcttcatttttgcaccacctttaaaaataaatcttccaaagacattttagctacttcgaatttcgttaaccgaacctggcgctgagcaaaagcgtgtaaaaggaagggcaccgccaactcaatatcctctaccaatattttgtaaccatcgtcttctgtaacaaagtcaacaatacgtttttgttcccgccagttcctgagctggttagtcaggtcatcctgggcttcgattatgatggccgcatcttgccattcttgctgaagcgaatcgagcgtccccccgtactttagctggccttgatcaataatgagcactgcgtcactgacttcctccgcatcatgcaggacatgggtcgagaaaagaaccgttgcttcctcctttaatgtttgcatcagctggagaatttcccggcgtccgacgggatcaagagcagataccggttcatctagcatgaccagtttaggctggtgaatcagagcttgggcaatgccaagacgttgcttcataccacctgaatattgaccaatacgctgatgagccgcttcggtcagccccaccttgtctagtaattctttggttctacgtttcgcttcccgtctcggcaaatgagcgagttgcccgacatagaggagaaattcaaaaccggtcatccaatcgcaaaagacgggaaactggggcaagtagccgatatcggcacgaatgtggccctttccgtgtggtgttggctggtggaactgtatggtgcctgatgtaggtttgactaatcctgataacatctttaatgttgtcgttttgccagccccattcactcctaataaagcgatgcaggaatgcggctgcagttcgaaagaaagattatcgactgcaggttgcccggtatatgtcttcgttaagtgccgaacagatacgaaactcattagtggttcctcctcccgaaaatcaagtacattaccggtccgaaaaagctaacaaataaaataaccggaatccagaacaggtgggcgcctttcgtttttgctagcttcacataatcgatgagcgcgacaatgaccaaaattaaattcaaaatgataacgggcgcaagcagcccccaaggaacatcagcaaaatctgtattcatcttatccttcccctttaatcgtaaatgtaagttcacatataagacggagtagatgataaaatcgttcatgaaaaaataaaaaacacaagacccctatcatctcgtgttcattttgcatctttttaacagcaactgaagcttcccttagttgattttgtgtattggtgttttctattcaattaatttggtacgtgaaattatcaataaggccaatataaatccgcaaattaaacccgtttcaatcaaactagtctgcagaaaacaacggcatacaaggatgagaaggtgcgtatgataacgccttctctgcccctgctatcatttcgcatagacaactgcgccactagacccaattaccataaattgattacctgatggagcaaaaccacattttatccaaccatccaaacggggaatgtctcacattgtcgcattcagcaagtattcataccttttgagcaaacacatggtcgatgatgattggatgctcgcggccaccaaggataaatcacctctaaactccatccttcaccagttaaatgcactccgtcacccgcttctatgccaaaaatttctatgtcctccgccgattctggaatgataatttcaatcccctgtctatgatattgttttcagttctgtcggtgtccctgtcccttaggattctctctccagtcattgaatggttgatgctataacctgaatttgagctaattaggatgatattctcttttgagtcccatcctgctgcgattactccagaggcagagagtacggtctgttgtctccacggtagaggaggcacttgtggaatcattttttgtgctttctccaataatgccaattcgtaatttgttcttatttcttgcttgttgtttttaaacatttcaaatgccactccgtacaagttttatgcgtctcactaatgtttacttaccactcagcctctagagcggtaagtagttctgacggcagtaccacaataataaatcaaagcaaacttcagttcaaacgggtgggagtggaggatacttggaacatttacctataactgaattgttcaatttccttaaacatgtattctgtgtagtttaggagcatatcctcgtcgagatttaaggtctctaatccattttcatactttgcaagacactgcgcaattgtatacttatactgattgggcaattcatttaaagcccattcacctgcttcttttttggaagaaatggcggattcccttacatacagaagtactcttgctagattaagcacataataaactggattatcaatgattccttcaaatgctccattaacatcagacttaattgaatcgatataatagttgtgatcaatagccttgaatacttccttaattggttttccgaaaagtacactcccgcgattatatgtcacaacaaagtgagctgctaaatcaggatcttcatatcctccgcagaaataggtctcatccgttagatactttactttgtggaatgaagaataatgaaattcaaaaggggttggatatacaaaatcaacagtatatgtctctaatactatactgatttcaaatcctctcaccatcttccattcttcttcaaggcgaataagtttattagcaatttccctgtaagtatcaacagatagcttttctttaaccactgctaaaatatctacatcactttgtaacggattaaaacaccccattgccatagaaccatgtaaataaattcctataagagagccagataattttttctttaaaagactagttaccttgtctaagacaacttgttgattcatattaattctccttgaataaaagcgggagctgatttcctctaatagtcgtcattgaacccgaggaactcgcgaacggagtctcagtttcgcttattgaacttctctgctaaacatttcttgcaaatcgaaaggatagccctagctctaaaaataggatgaggtgaaatggggacacggggctctgtgaaatcgatcaatttgactttacgccttcccctgatgcatgtcatcgcgaatacacttccaatgctcgtaatacaaccgcctcatttattccacttaccctactaattcggttggcccattcctcaataccacttaactgatcttcgatttccctgccagtattacgactaataaaacttttgtaattaccaaattcccaatgaccgacttgatcgtccataaacaaacgtttctcaacaagggggcttgtgatgtttctctgcgttttttctcctgccgcaatcaactcactatcggaaaccggggtcaagttaaatgactgattgctttccttgccatttggccttctataagtcacaataaggttttccaactgtgttgtcagcttaatttgagcgcctggaaagaacccttccacaaattcctcggtatattcctcatgttcccggtctatcagtataggctgaacccattgatctccaagatcgcacaaatacttataaccttcatcatcaataacgactaccgccacatggaaatgaggagtaaacactgcataagcttgtaatttattctccctaaattcgttaattaaccaaatcgctaaatcaaaacagttgccagacgttccatattcctcccgatgtaatttcattaaatccactgttcgttgcttgttaaccgaagcaatctggctataccaagctttagttaaggtttccatcggaaagtcgtcgaatcttctccaaatgtcaatcacactctgagacgctttcattgccctctctccttcattcttcttcttgaatagatagctcccgaataaggaacaaagatcattgtgaaatctccggcccattccatctgtctgcgggcattgaaagattatggatccggcagttcattgaatgcctctcacttgaacatttctttatttgaatattattaaataaaaccaattaaaatttggacagccaaaacggtctattaaacggtcgtgcctggcgaccgttccgtttgtttacgcatccagcgcagactaaggatccagccgcctaaagcaatcagactgccgaccaggaatggggagttgatttgaacatcaaacaaggccccggcaaggatcgggccgccgatgttcccgagactcgtataggaagcattcaaaccggcaacaagcccctgttcgttgccggcaattctggaaaaataagtgctaatcgccgggcgtacaaaatcaactgccagaaaaacaagcgtgaccgatacaaccatcatccaatattgggccgaaaagatggtcgcaaccataaaaacagccatcactaataagcaatagaccgtcagcttcttctccccaatccaattgatcagccgcccgaagagcgtcagctgcatcacagcgccaacgatcgccccgatcatgattaaccaggcaatttcattaggcgtatagctgtacttatggtcaacaaaaagtcctaacaccgtctcaaattgggacaatccgagcgaagtgatcaagatgatcaacagccctgtaaaataaggggtgcgataagatttggcaagctgtgcgagttgagactcttttcggtccatacgtgcctctggagcaggcaacttgttcttatccagtgactctggcaaaatactcattgaaacgacagcggataaggcggcagctccagctgcggcgaagaaaggcactcgcataccgtactcgactaaaaaaccaccgatcgccggaccgatgataaaacctgttgaaatcgccgcattaatccagcccattcccattccccgatcctcttctgtcgtaatatcaacgacgtaggccatgacggcgggcataataaaggcaacggatacaccgccaagcagtcttgagataaacagcaacactgcattcgtagccaggccaaaaagcagctcggatacagcaaaaagcagcagaccggcgacaatgatccactttcgcccataacgatcagaccaactgcctgcataaggcgccactagaaattgagttaatgaaaatacagcgaccagaaggccaacgatcgttccagagatgccaagaacgttcatatatgtcggcataatcgggataaccaagccaacgcctacaaatcctataaagatattaaacatgagcaataaaatagcccctctgtttcttgttgccaatgccttcattctacaaattcctccgaattcttctctcatgactatctatacaatgattctatatcattactatttacggagcttattttctaagagcctctatcagcagttgttctggatagttttccagctttaaaatcggcgcccgatttaatggtttgttcagtggcaaaattgtcctttcactcgagcaaataatcatcaatcatagattttgatcgatatacgccccttactttaaattcaccactcgtcgtggtgattctccaatacattatttgtacatgagacggcgatcattttattttcctttctagtatctaatcctccgtctctttacaatatatcatacttttctgcaaacgattaatgggtagggcgccaatattcaacttttccatagaccttgaaaatccttttaaaagtggtcgggtcatgcgttaaacaagctatacgttctttaatcgatttctcattgtggaatccgtttctgttgcataagaagaatatgcagctgccagccctctcggtttattcatattgacataaatggattcatagctacctgctttcacgacataggtttcatggaaaaaaccaactccttttgagtcagccgcttttttataaaaatgcgtccaagcattcatatgcgtttttccatgggcgaaatcatgtaacgactttatgttttcccaatattgagtaatcacaatattcctgccattccaaccagcttcataatgaagaaaaccagtgccttttttgctggaaagttcttttagcatcggtggcatggcactaaaaacgggtccccatgctttgatattccaccactgctggattttcatgccaacgataaaaatgactacatcttggtcattgggagcactaactcgcttcgcttttgtcattttaatttctcctttgtttttttgcaccattgcagctcggctttagctacttcttttccataatctaacgtatataaccaaaattcagcgccggggtggatacttagctgtttttccatttgttcgtaaactttcatttttccttgtaacaaccgttcatgttcacaaatgtggtgaaaagcgtgttctcggttcatttcgtttccaaaaaacagttttacgagcagttcatttttatgaagtccactatcgtaaataggagccaccagccaatcatgaagtttatgctttcctgcctccgttatctcatactccttccgatccccatcgcttccgatttgactaacatacccctctttaactaacgttttaagcgcgggataaatttgtccataactcattttccaaaaatgctcaaaactattatcaatgaccttttttatttcgtatcccgttctacatcctcctgacagtatgccaagcacaatccatttagcctctgttttcatctcgccctccatatatctttaagatatatctaaaagatatatggactcgatccatttgtcaacagcaataatgagttaacgaaaagcgtctcccatctttttaaatcggagtatttgagatccttttttattactaatacgattgcattcaactagttttacagactttttgactccgttttgctctgacatgcatggatgagccttacatgtttttgatctccgccttttctcgtggtaaagttttatcatgcccttctacatagctacatagtgttcacctctatctgtacgagcgatcccattgaatacacaaatccccattcatacagctttccctatgatgatggcatactttctctaatgaatttggcggtaataatctgtcacaattgagcacagatgaacaggaacgactaacacaatattcgtagacttagtacagaaaggagaacatacgatgaaaagccttcaaagaatgcttgatagcattgagtatatagaaagccatttagataacgagcttttgcttgacgaaattgctgcggttgcttgtatgtctaggtttcactttcaacggatgttccgtatgttaaccggctatgccgtatctgaatatattcggaatcgccgtattacagtagctgcacaagaactcgttcattccaaatctaaagtaatcgatgtggcaatgaagtatgggtatgaaagcccagaatcttttacgaaagcatttcggcgaatacatgggatctctccatccgatgctaaaaaacatagtcaatccttgaaggcttacccaaagatctcttttcaaattcaattaaagggtgatgtggaaatggattacaaaattgttgagaaagacgcgtttaccgttgtaggaaaaagcattcgtacgactacaattggcggagagaacaaccgaaagattgctgctttctggaatgaatcgaatcggaatggattgtcaaaacaacttgctaaaaattgcggccctcttggattgcttggtatttgcattgattttgacaaacagcaggaaaatttaacctacctcatcgctgcagaaaagaatagtgatcaaattcctgttgattgggaaacaagagaaattcctgcggcaacttgggctatttttccggtacacggggcaatgcctaatgcaatgccaaaagtatgggagcgaatcttttctgaatggtttccggcaacaggatatgaacattcaggtggacccgaaatggaagtatacgttagtgatgctgatccttattcaaaggactattacagcgagatatgggttccagtaaaaaaatgacaaataaacagcgcatgagacagcctttgtccatgcgctgtttgtccccccaaaaagcccaacactatcagtgaagcgatacataaagccgtaaatgccaacatggtaaaaatgtttaacatatcggaaattaaaaacagataggcttgttggctactgtccttgacacagataagatcttttttaataattcttctagctttagtctatatccccactccatctttcataaacggcactgccagttcgtatgattctatatggacattattcaatcacgatagttatgaaagcgattacaaatagaggaggtcagctaatggactgacaaaaaacggtattctcttaaccgcccgacggtcaaaacggacactacccctcccccagttgcttgataatttgggaaaccaaagccatttattttgatttttttcagaaaatatcttttcaaatgaagtcagaagcggtagactcttggagaagaatgttttttaaacatttcatcattttttaaaaggaggagtacacttggctcgagaacaatggggaacaagagccggctttattatggccgctattggatccgcaattgggttgggaaatatatggcgtttcccctatgtagcttatgacaatggagggggcgcattttttctcgcatatttgtttgccatgcttacagcagggatcccgctattattaatggaattttcaatcggccaaaaattcagaggatcttccccgctttcatttgcgcgcatcaataaaaagacggaatggcttggttggtggcaagtcgcgatctcttttgttgtggccacatattattcggttattatcgcttgggctctgtcctatatggtgttttcatttaatcaaagttggggcagcgacacccaaggtttctttttaggggactaccttgaagccactgaagctggtgtgcttggtggattgaatggcaatgtgttaattccgcttatcgttgtatgggcaggcgtatttgtgatcatgttagctggtgtgaaaaaaggcatcgaatgggcaaaccgcatttttattcctttacttgttgtgatgtttttagcaattgttgtacgtgccctcacattagaaggtgctgtcaatggattggatgtctttttccgacctgattggcaagcgttagcccaacctggtgtttgggttgccgcctatgggcatattttctttagcctttcaatcggctttgcgattatgattacttatgcaagctacttgcctaagaaagaagatttgaacaatagtgcgtttattactgcttttagcaacggaagcttcgagctacttgcaggcatcggcattttcgcgacgctaggttttatggctggtaatctcggtgttcctgtggcagaagtggcaacgagcggcattggtctagcctttatcgcgattcctgaaatcattaatacgatgccaggattcaacggtttgttcggcgtcttgtttttcggatgcctcgtattggccggtattacgtcgttgatttcaattacagaaacgtatatagctggcgtacaagacaaattcaaagtatcacgaacgaaatcggttatcgttggcggcggtttatcggcaatcatttcgttgttgtatgcgacgcgtgggggcattaacgtgttagatgctgtcgataacttcattaaccagttcggcattgcatttgctggccttgtctctgtcattatcgttgcttggattttgcgcaagctcgatttcttgcaagggcatatgaatgaagtatctgatttccgtattggctcatggtggaaattcagcttaatgtttattactcccctcgtccttggcgccaatatcattcttgcgttcattaataacattcgcgctccttatgaggatatgcccctttctttcttagctatttcaggttggggcgttgccggggcagcttttgttgtcggccttttacttagcctgattaaatggcctcctggcaaattggaagcctataagaaggaggatgattaacaatgagtggaagcgccattgtcatgatgattcttggtatggttattctatggggtggtatggtggcaagcattgcctatgcgtacattgtctccaaacgtcgtaaaaagacaaactagcccatgtatgaggacggcgcatcttttgcgccgtcttttttcgtggtcaataaagaaggatgatttggacagactaagcccataagcagattgctggtaacattctttgtccgtctgtacaatagaaggaaacatctagcggaggtgagcttatgcctacagaagaagaaagaaacgaaacgaaagaacgggtaatggcgcaattagaagaagtgattgaccctgagcttggtgttgatattgtcaatctcggcctcgtttatggcattgaactagacgatgagttcaacgttacggtagaaatgacgctaacgaccatgggctgtccacttgcaggaacaattcaagcggacgtcaagcgggccctttccgaattacaagaacttggggagattggaaaagttgatgtgaatatcgtttggagcccgccttggtcaaaagatagaatgtcacgttacgccaaaattgctctcggccttcctgattaaactgtacttttccgcctaaaaagatagacatggcttttgcagggcgaaataagacccacgttatgtgacaacaattaaaaaagaataaagtctttgcaataaagattgccttaaaccgtcatttgcagcaaactaacattgtatccactacaacaaatggaggtcggccatatgtatacccttgcttgtttgcatgacggctcggtaactgtccttcacagccagcgctattgccccatcaaggcttttactgatgtgatggcagcaaaagaattggctcgacaagtacatgctcgtttaaccgaaagtggcaaatggcatgtgttgaaagtgggaacaacataaaggaacaccgttcataagcaggcccccctcctgcttatttttttcgcctactgcgatatactccgttttgactgtgtttgttttggcgcaatagaagcaagcaaaaggccaagcaacagcaacgcaatgccgccccatgagtagaaagagagcgactcccccacaaggctgactcctagaagggccgcagtaagcggttcggctaatgcaagcgttacagcaagagagcctggaatttcttttagtcctttcgcaaaaagcatgtaggccaagccagtcgcaagcaagcctaaatgcaaaacaacgagcccattttgccaatgaagcagccagctgacctcaaataaaaagaacgttggcaacaacacgatcgcgctgaaagaaaagataaatgcgacaacgacttcaggctcccctttggctagaagccctttgcttgctaatgtataagcagcaaaggaaagccctgcccctatagcaaacaaaacccctagcggtgacacaactacggactgatcgccagcggtcattagcaacacacagccggcaatcgccaaggctgttgcttgcatccaacgctttcctggaacccgcttaaaaaaggcccactccaacaagcctgctactattggggcactgccaatggcgataacggttcctgccgcaacgccagtcattgacacagccgtaaaaaagaatggttggtaggcagccatagccgcaatactcacaaaaaatggccatttcggccacccctttatatttagcgatttgcccgtcaaaatagcaaacatgagtaaactcattcccccgagcaatagccgcgcagcccccactactaacggatgggcgccaattaaaaatgcttgcgctgtccctgttgttccccatagcatcgcagcacatagcacgaacacaatcgccatcggcatcgtccatcgctccaatcgttctatttgtcttaagtcatcataaggccatacgctctttttgagccgtccttgcctaatgccaaataaggccgaaaacgagcacatcttgttcgtcggcaatcgtttgttgaagctgctttggttcataccaattcgatgcgccactgttgcctgaatggatcaaaacaaggggattatcttccatttgcaaatccagctgctctgcttctagcgccactttcccgtctactccagaaagcgcaggcactgctagagggccagtcgagtacatgacccgatccccttctttctctacaccttctatccagcatgtatagtataacgtctcatccaattcttgttcctttatcgctaacgtaagttcttcgtaagccgagaaaggcgtgtctttgtcaaaaaacagtgtgaacaactcattagagtcttcttctacgggttcaccgtcttgataccgtttgctataaaagcttagctcttctatttcttggtgaccagcattgcttaaatcaaaggaaaacgaataagtggtaccgatttgcaaataccgttcttccgattcggacaatgcctttttcggcaaaatccctgtttcctctgattggcatgccactaatgttaacaatgtgcttatgagaaaccatgcgctttttttcattttgtttcctccccaaaaatttttcggtattctctcctattccgaaatatctgttaatggtaccagcaatgcaacgtgtatgggaagagaacacgacggctatggcttttcccgttccgctagcgtcaatcagcagaaacgggcgccactaatagcctgacatctcagtaaatcagcatgctcctaaaaggatatttaggcagcggaaagccatggttagtcttccttgtccctcctaagccaagtcaacattgtgaaaaacttgttgtacatcttccaagtcttcaatcgcgtcaatcattttttcaaactgtgcttgcacatcctctgaaagcgtcacttcgttgtgggcaatcattgaaaactcggccacagaaaactcctctatccctgcgtttcggaacgcttcttggacagcatgaaactggtctggttctgcataaacaatcaccgtgtcatcttcttcgatgatgtctttggcgtcaacatcggcatccattaaaatctctagtgcttcatcggctgtttttccttcaaaaccgatcacagctactctgtcaaacatataggcgactgaaccactgacgcccttgttcccgccatttttcccaaaagcagcgcgaacgtcagatgcggtgcggttgacattgtttgttaaggcgtcgacaatcaccatcgccccgtttggcccaaacccttcataacgacgttcctcataactttcatcagagccgcctttcgccttctcaatcgcgcggtcaatgattgacttcgggacattgtacgtcttcgcccgttctagtactgcttttaaagcttggtttaattcaggatcaggctctccttgtctggcagctacataaatctcacggccaaatttggcgtaaatccggcttgtattggcatctttagaagcttttttttctttaatattattccatttacggcccatagcggtacccactctctttcccttattcaattccaggccaaagcgctggttctccacgttattataacgcataatgaccgacttgcataagcagaagtggcgaattatcccagtgttcttccttgtcggcaatgctacttgcttgaaaaaagtatcgttccactatcgataggaagaccgaaaaagcgagttggacgagaacgagcaacacgctttaaaatggtcgcgatgattcatttggttgcaaatcgaggcatagttctatcggacagtgatcgctgcccaaaaccgatgaatgaatagaagcgtcgacaagataaggcatcaacgccctggaaataaggaaataatcaatgcgccagccaatgttacgggctcggacattggccatgtacgaccaccatgtaaaggcatcctcatcatcagggtaaaaatggcgaaatgtatcaacaaaccctgcctccagcagtttgccaaactcggctctttcttcatccgtaaaacctgaattgccgatattcgctcggtcgtttcgaacatcaatcggctggtgggcgacattgagatcaccgcagaagacaactggtttttgtgtcgctaatagagtcaggtattccctagcggctttctcccactgcagccggtatggcagcctgcttaagtctcgtttggcattaggggtatacatcgttacgacatagtaggtctcaaactcaagggtgatgacccgcccttcgttctctggaaaatgatcgccgattccatatgtgacagacagcggagagtgtttagtaaaaatcgctgtccctgaatagcctttacgctccgcatcgttccagtattgttcataaccaggcaactcaagcgagatttgccctttttgcagcttcgtttcttgtaagcaaaacacgtccgcatccacttgttgaaaaaaatctaaaaagcctttttttacacatgcgcgcaggccattgacattccacgatacgaatttcatagttgtcgtactccctctctctttatccagtgcccagtgtagcatagataagaaaaaaccagtaccgttttgcttacgtgattctgtacctcggtgtgagtatttgcactcaatctactgctcagtccgtaagttgacacctagttggtaatccgtttccatgatctctttaggcaccatgcttcctcctgtcgcccagactagatgagtcgctgcatcggtatatagccctctcttttcaagctgtacagggccgtataatcccgcaactgctgatggctccaaatagaggccttctgcgtcagcgagctcagccaagagtgtataaagcatcgggtcggcgattgtgtagatgccctcaagcaatggagccatcatgcggccaacaaagccagacggtctccctaccgcaagaccgtcggctgctgtttggttgtcgattccaaagtcttggacagaaatgtgctggtgctttccagttaacataccaattaacatacatggcgaatgggtaggctctgcgaaaaaacagcggacagcgtcaccgaaaacgagcttcaagccgaaagcaaccccgccaggaccgccgccaacgccacatggaagatagacgtgaagcggttggtcttttgtgacggcaatccccttttcctgcaactgttcttttaagcgaaatacagcgacagcataccctacaaatagatcaattgaatgttcgtcatcgataaaatagctgttcggatcggcgtctgattcttttcttccctcttcgactgccttgctgtaatcggcggaatgttcgaccacacgcacgcctttttctcgcaacatgtcttttttccattgctttgcatcagctgacatgtgcaccgtcacgcgaaaacctagctttgcgctaatgatgccaatgcttaatcctaaattacctgttgatccaacaacaatggcataagacgagaaaaacgattggacggcgtcagtggcgatcaatgaataatcgtcttgtttagtgagaatttgttggtcgaccaacaagctttccgcatgttttaacacttcataaataccgcctcgcgctttaatggagcctgaaataggcagcgcgtgatcgcctttcagcaaaagtcggcctggcacgttttggccaaatcgttgttcaagcttgtgcttcattgtggcaatgtcgataagcggcgattcgatcaagccccctgcccctttcgtttccggaaacacgcttgctatgtatggggcaaagcgtcgcaaccgctgttctgcttccttcacgtcctcttcctttaaagaaaggcctgctagcccttcgctagcaggctgcctgttcggattggcccaccacacttcctttgtcaatgcaatttgttgtaaaagtgggtaagcttccaaccattgctctctgtttttgcctgctatgtccacgtttatcccctccttttttctttaactttagcacatgtaagaacaatccggctcgggatattcctgtttgtaaatgcacatcgtaaatgggaacgacacttttgcacttctgaggatttaaaaacatgaaagggaggatcaacttgaaacaagccgtttttttagaccgtgatggagtcattaacgaagtattatccaagcgtgtcaaattcgttaacgatgcaaacgacttccatttgctggatggtgtggccgaagcgatccgcttctttaacaaagctggctttctcgtctttgttgttaccaatcaaggcggcattggacttggttacatgaaagaaaaaaagctcgagcgcatccataaaaaaatggaggccgatttaaaagcgcaaggggcaacaatcgacgatatcgcttattgcccccataaacctaatgaaggatgtccttgccgtaaaccaaaagcctatttactcaaaaaactagcggacaaacattacgttgacttgcccgcgagtgtcatggtaggcgaccgcgagccagacattcgcgcgggccaaaaggcaggctgccaaacggtcttagttcacgcacgcactgaggacgatttccaagcagacgcacgcttcccggacttgcgtgccgccgttccatggatcattgcccaaaagagagctgcggcccgttaaagcaattcttctaatgccccactctattggggactgttttccatttcattaattgcttgcagtcttgctctaacacgtgaaacggatcgttcccgaaccattcaatcgatacattgacgccgtccaattgattcgctgacagaaaggactcgtaatcaacggatccattaaacagcccggccattccctctctagatccggcagcagcataaacattttcaggtgcaaatacatctaagtcttctggcgagcgaatgttttttacatgcagatggcggatatgaggctgcaattgtttaaacgctccgtttacatccgctccgctttcccatacatgaaggacatcaaaattgattgctaaccctggatgatcgacttccgccaacaattgcagcgtggatgggactgtatcacatagcgtatggggatgtgtttcaaccaacacatagtgccctttgtcgaaaaagtagtcacaaagacaagctaaccgttttacaagataggctcgttctgcttttgtcgtatccttgcttccctttgcaccggcaaatgtgcggatatggttcgtattccatctcgtcaatagacgcgatgcctgtttggcagcctctattaatgtattccattcctcataaagcggaaagtaatcgcttactattggtacgatcaggccctgttttttaagccagtcgccattgtaggatggagtggcaaacaagtggcgggcatgaggggcccacaattcaattccatcgacatcgtgcgccttcgcccaatcagcaagctgttcgatcgacactaatgcatggcgaaaagaaatggtacaaatcgacacattcatgcgttcacccccctagccatttcttgtaattgttgccattccctaaaataatcgtatagcctgtgtttgattcgcctttcccgtagatcttgtttttctagttgagcaagcaccgcttggtaatcccgctcatgtttggttcgagaaagtttcattgcccggtaatgaatcgtcgtatagcctttcgccaatttctcgatttcatcgcaccactcttcaaattcagcttccttaaagccaagttccttccaaaagtaagcaaacgcatgttcatacgcatatttgcgaatcgccagcacaggtaactgttttaaagctacggcaagcgctgaacaacgcgccttttcacttccgttcacataggcttcaacaatcgttctcaccccttcggtaagaggattcgaatgcaacttcatacatgtttgaaaataggcctcgactgtttctggcgtcggctgatggatctgtttcgcatcaaaataaaagccaccccctacgtcaggggaacggatcgcctctaaaatccgctctttttctatgacgccttcccaacggtagtcgggatcgagcataagccattggctttccgtgcctgttttttctaacagcacataatgagggaacggcttttgatggaatttattttcccgttctggcaaaagcgccaaatcaagcatcaccattacgttgcgaaaagaaggcctcgtttcaagcagcgtttcaagcttggcgatattggcttctttcgtttgctcctttttataccactcgtgcatgtcaattccgtacaaatgacgataccagtttttcaaaaaggaatggtcgattgtttcggaatgataagctaaagcatacgaatcgtcgatggcaaaatcagcatcccacacaccaaaataataaggacgatggtcaatgcctctttttttaagaacttcgcatatgcaactgacaaaacagtggactttaatcataaagcggctcttcctgtttgtcggcaacaaacgcagccaatgcgccgactgtgtaaaatgcttttatatcaatgtgctcatctgggatggcaacgccatatttcatctctagttcaagcaaaagctgcaaaatcataatggaatcaagcgctagatcttcgttcattcgcgcgtcttgatgaaactgttcaagcgttggcaattttaattcatgctctaaaatcgtgtaaatcgcatccatagcttcctttttcgtcatccttttgcttctcctaactttacgcggcttacttttccgttcgcgctttttgcaatctcttcaacaatggtcatttcatgtggaacttgatgaggcgctagcctgctgatgcaatagctccgcaattcatgaagggataacgtctccgttctggcagacacttgcgcgcaaacacgctctcctgcataggaatctgcctttttatagacgaccgcatcttctacgctaggatgttcgcgcaatacgtgttcgacttcgtgaggataaacattcaaacccgcgacattaatcatgtcgtccagtcgttcccgaaagcaaagagctccatcttgatcgatgtagcctagatcgcctgtgttgattatgcgtctgccaatggtgacttgaatctcgctaggattgtttctcgccgtccctgctttggcctgtacatggcgaaggggcacgcccaattcttcagaaaaacgaagtggcatagcgatgctaatacagccagcttccgagcaaccatattgttgcagcagcatttggctgtttgattggattgactgaaaccattcctctggcaaacgtgttcccgaggtcataacggcctgaagcgtgtccccattgcttagctttgccaatgcgtacagaagtggcggggcaccatacaacaaatggttgggataatcggttagttttttaagtacatattttggattttgcgcagttaacacaactacctccttatcctgggacagtccggctaacaccccactaatgagtccataggaatgggtgactggacaggcaaccacaaccgtatcgacgtccacacgagccatacgctcggtgtaagcggctagctcctcatcaatcgatgaccaactgcgctccaattgttttggtaccccggtcgtgcctgaactaaactggacaagccctggaggaaaggtgctgaccgggtttgagagcgtcaatggtgtttcaaacgtatgaaaaaataagtaagcacaacgagcttgcacagcaatcttcttcgctgcagcaagaggcgtacttggatggatcggtactatactgccgcctctttttttgacgtataacaggagtgcaatccatttttcaatttcttgtgggcagacagcaatccgccattgttcagctgttttccagatggagtgcatagcaaactgttgttcgcaccgcttcaaatcatcttttgtataggtgcaatcgtttacagttaacatgtacggctttccctcccaagttcattgttgaccaaatggcgacagttctccttccctgtcaccttgctcgttagcagtgactctgtagcgataacaggagcagctaaccgtaaagcttgcaaacgctctggcggtacgagttccctggcagcgtaatcacggatgacgcaatcgaccaatgaccaaaattgctgctcgctaaagtgaaaatgttgttccagttgccacgatagttctgtgagctgataaacaaaaacagtatccatcactagttcccttagtgcttcaagggaagacatccaataatactcgtcggttttccctgattgaaatgcttgatgcaatgtggaaaagtgcgggatccaagcacgttctttcacaaaactctctttgtattcgatactttcatgaaagtcgcgcaaaatcacgcgttttggccaccctttttcagtcacaagaatgacgttttgcccatgtgcttcgagagcaattccatgctcagctagaaaatggattacagggattacgcttattctgaataactgcataagccacgcctctatcccaaaccgctctataaaaggggcgataaacaacgcgccgtcttcttctatcagtggtaaagcgttcattggaatcgcctgctcccctggcctcagtttggagggaacgctttcgcgccaaatacaaccgatctggccaaggatcgctttgttccattgtttgcctttaggttcgtacgccaccccggcatactctgctaggcgctcaacgccgatttcgtcttttaaaaacgggtcactgtcaatgatgcgttgtaaccacacggaaatagctggagccgctgcaatcaaatgaggcgggattgtacgaaccgaagaggtattgacgacatttaacggcaattttaattgcgctttcgttccatgctcgacattcatgactgttcttaaagattgagtcgcacagtatgcgtcgccaaattggcctaagtacaacacgtctccccttttgatcgcttgttggagcaaatgttcattaagcgcttgccattgccacggatgaacagggacgaactcgtattcactaagttggccgcccgcttcagataatgcttttacgagcgcttgccagacaggaatgcctaattcctgctgcaaaaagtaacctgcatcctgaggataatggacaatcgcgtcttgcttgcggacgccaagccagacaagctgaaatgattgttgtgcttcgggcccataacgatcatgatcgtcaaacgaaaatccttttcgtgctttaaaacaaggatggtaaggatggccttcgattagcgctgcttccaattgttcataagccaatccccttctcgatactgtctttctaagcttcgtttcattccaatcacttagctttatcgtttggaaaagttcttctatcagcgcttgttttctcgtttcttcggcagtcagttcattgacgatttcctctatcttcgccagccgcacttggcgttcgcctatgagtcggtacggtccttgccgcaaacgaatccgcccaaaagcagaccgctttcctatgcattggaacaaacacgaacgaccgtacacggtaaataccgtatccccattgcttttattcgtttcctcgacgtccagcaacttttcaaataggatcgcttccatcaattgacgtcgtacccgcaacgctgccttagaatatggcgctgcctgcatgtgcataggcgacaccttcttttttacccgtgcttttaaacgggtttttgattgacgtatagaccgcttgttctaactcttcggctagttcatcgacatcgtggaagcgcgttagtaaatttgctttgcaagcaagctgttcgtttcccagtaacccttgtacaaaacgcttgcctgctccaactaaagtaacctccagttcagcaagcgctgaacgcaacacttcaagcaaaaccgcttcttcctggagaccgtcaacaccaaaacggcagattaatgaaaacacttggttcaagatcaaatagtacgcaaatcggtcgtcaatgagggcgtccttgtaaaatagtccatcgacgtcctttaatttaggctcttttgccaacagagcgtctttataagaatttgccaagtaatagccttgattgtcacggtaataaaaagcgctcgggtagccgctataaatgttgagtaggctattttgttgatgtgcttcaagtgccaaaccaagttcgtcgtacaaatggataagtggccgaacagccacgtcaatatagtgtttaaaccaatgaatgctaactgtggagactggtagacattcgcgcaccgcgacctttttcattaagtccgcaagctttgaatcataaccaggcaatggatcttgggtaagagcagcaatagaagtgacgccggcaccgccatcttgaaacggattttcacgaatgatcgtttcaaaaccgctttcttccattccaggcaaacgtaccgtcatataagctggatccccgatcatgtgaaaccccttatttatccggagcgtctccgagtggtggagcaacgttgctaccaacattcctgcttgaagttcatgacgccggttcaatcgcagtgaattggtgacttttactggaatcgaaaacttatacatccattttcctgattcacttgtaaccgttcgtatcgaagaggttgcgctaaaaagcttccccgctggtcctatgtcttttatcaacccttgttccattgcctttataacagaagtgtgctttagcaagtattgggcttggagcggatgcatcggaaagacaatccaattttgatcgttatttcgaaatgacggagcgccaacgtcttgtgccaccaattcacaggcgctgctctcaagcaacgagccgtgttcaacaaggtcatggtgaacaagaaaataatggagctgaaaccgtccttttaactccggtgcatataatgaatgttgccaataagccataccctgcctacttttcggtgttggatggaaccaatggccatacaagagcgactgttccgaatcaataaaacattgtttactttcgtatagtttccccccgtctttttgacgtacttcgatataggagtgcatcgtttgaagactatcgatcatgcgcaacaagcattcttcaaaacaagagcttcgcttttccggatttgatttcgcttgtgcatgcaactcttgtacaagcaaaatcatggctgaaaaaggctcttcttgctgccactttcctccttgcttaattcgaaaaacatccccaaacgtgtggcggccgacaagggacctgtaaggcacatcgatccataacgttgttttctgtattggcaaatgcagttccatgatgaaagggccgtgcatcttttgttgtaattcgacttcatcgacggttgttaatgcctttatgcaccctgcccccgtctcacgaataaagccgtttacaaatgcttgaaatgacgcactttcggcaatatgtttcgttgatggagccatgttttcatcccttctggaaatctaatgagatttattctcaattatgttttaaaaaaaacgagttgccccgttatacttgtacaacaccggttcatcgcgtctctttttaacgctccaatagtccattagctttcgtgtttaacaggtttgcgagacgatttgccagctaagtggttgtatactttttggttggaatcaatgataaatgaaggtttaggcttgccacgattggcacgatggccagccagatgggcatcacttttttcccaagccttccacgactcttctgaatcccagcgaatcagcaccaaaatctcttctcggccttttcgtggtttttgtttcattacttgtaaatcaataaaccctggttgctcttcaatgattccgtcagcagcgaatttttcgaccatcttgtctccatgtccttcttcgacaatgagcgttttcgtttgcaaaaaaaacattcaatccctcctcgtcttctctattctcattatattgataacgattatcattttcaacttcttttttgaaattgcttccatttgctcatagcagagcgactccgatgacgaacactagccttttgtcttccacgattaacctgaaaaacacacattgtcgttcttatcctctcatttttgcttcctcaaaacgcgacaaacgtcctagttacataaaaaaacacgcgcgtatcgcacgtgtttaaaacactgtaagccctatttccaaatcttcggccagatcctcaaagtcttctaaaccaacagacaaacgaacgagtgtatttgtaatgccaagggcactgcgcctgtcttctgggatcgaggcatgagtcattttagctggcaatgaaatcaggctttcaactgctccgagactctctgctaaagtaaaataggtcgttttgtttaacacattgtcagcaatttcttcactcgcagcctcaaaagaaataatgccgccaaaccctcttgcttgcaaagcatgcgttgcatggccaggatgttcaactaaacctggatagtaaatccggctgacatttggatggccaagcaaaaatttcacgagcatacgcgcattcgtttcaatttcttccattcttacaccgagcgttttgatgccccgcatcaatagccaactgtcagtcgggccaagaacagcgcctgtcgcattttgaataaaagcgagcgtttcagctagtttttcgtctttaacgactaccgcgccagcaacaacgtcactatggccgcctaaatattttgtggcgctatggacgacgatatccgctcctaatacaagagggttttgccaataaggggtggcaaacgtattatcaacaataagaagcaattcttccgcttgcgcatagctggccagtttccgtatatccgttactttcagcaatggatttgttggcgtttcaataaaaatcgctttcgttttgcttgttcttgcccttgcgacagccgcttgatcctccgtatcgacaaaagtagctgcaatcccttccctttgcaaaatctttgtaaatagccggtatgtcccgccatacacatcgtcggttacaatgatatgatcaccagatgaaaaaagcttcatcactgcggtgatcgcagccaatcctgaggcaaaggcaaacccatgggtcccgctttctatatcagcaagcaaagactcaagcgcatggcgcgtcgggttgcccgttcgcccatactcatattgaaagttgccaattcctttttgtttaaatgtgctggctggatggatcggtggcgtgactgcgcctgtttcagcatccattccaatgccaccatggataagctgtgtctttttcctcacaaaggttcctcctcataaatgcctttgctcaaataccgttccgccccgtcaggaaagacagtgacgatatgggcaccttcgtcggccatttcagcctctcgcaaggcagcttcaagagcagcacctgaagaactgccgacaagcacaccttgatgttcagcgagttcgcgtgtccgcttaaacgcttggttgtctgaaatcgtataaatggcttcaaataaagacctgtttacaaagtctgggatgaattccatcccaattccctcagtccggtgcggtcctggctccccaccatttaaaatcgaaccctctggttctaccacaacagtgcgaatgccagggatcacttcttttaaataagcggctgttcctgaaaacgtccctcctgttccagcgcctgcaacaaaaacatcaactttgctatcaagctcgtgaacgatttctgggccaagcgtctcataataagcgagtggattcgctttattgctgaactgctgcgggcaataagcatcatcaagctcttgttctaacgcttttgcttttgcaattgctcccttcatcccatgttcactcggtgtatggacaatgacagctccaagggcgcgcatcagctgctgtttttcgatgctaaatgcctttggcacgacacaaatgacctttacatccgtgccaatcgctgcgagcgcaagagcaatccctgtatttccagccgttggctcaatcaatgtgcccttcggtgtgattttaccggtggcaattgcttccttgaggagtttgatgcctaaacggtctttaatgcttcctccaggattggtatactccaactttgcaaataaacgcacacggcgcgggagcggaaaggccgtcagttcaagcatgggggttgaacctatgagttcatggatatggcggtacacttccatctaaccacctcatttgcaatgccgtttatttcaacgtatgtcgcgaatttggattggtgcctacttttgaagaagagaaaaagcgccgccaggacacatgggcagcgcttatagggggcctataaggaaacaagttgtgggtaaatttcagccaatagccggtatgaatgaaggcgatcgctaagctcaggcgcatgcgtcaacaccatcaactcatcgacatgaagcgcattagcaatggcatccaggcgttctttcacatgctgtttgtcgcccacaatggcggttgatggcacattcattacagcagcacggtcttcttcgttcaactgggtgagaaaataagccgtttccgcttcagtcgggatcgcggccatcatcctcccttgttgattggctgtttgccacagccgcacagagcggtaaagctgcctcgctttttcgttcgattcggcgcataaaacaaacacacaaacaattggcttcgtagcctgattcgcacgcttccgatagtgggcaatgacatcttggccgttttgatcatccataaaatggccataaacatactggaggttatgtttagccgctaaggcagcgctcttcttagacgttccaagcatatacaccgccggctgttcataaggaagaggcacagcttgtaaggaagcgtatttatgcccttctggaaagtcacgtttcagaaagtgcatgagctccgtcatacgctcgtccatcgtatgaatgcgttcgataaagttgccagaaagggcttccgcagcctctgccgaaccccctggcgaacggcccaagccaaggtcgatccgccctggaaaaaggttggcaagcatgtgaaaagactctgccactttaaaaggggcataatgaggaagcaagattgctccagcccctaagcggattgagttggttttagcaccgatgtaggctagtaaaatttctgggcttggcgaaagcaagccttgcaaatcgtggtgttcggccacccagtaacggaaatagcccatgctttcagctgcttgagccaagtcggctgtttcctttaaggcaatttcatttgttgtctcactggagcgaggaacttggtctaggacactaagttttatcacaagaatccttctttcatttagtcttcctttaccgtatcgaattttgtagggattggcaacttaaacacaaaaaagcagaatggacgatcccattctgcctagcgcgctttccgttttttgtccgatttccatttcttaaatagctgaatcgcttctttgttctttttttgcaaatcagccgtgtacggagaggtagcaaacccaggaagcacgctgttagttgatttctttgtcgtcttcttcatcaacccttcacccactcaactcattataagatagactattcctgcatgctttcatcggtgagaatggctatgcctattttttcccaatcattcttcatactgctcttcatccccgccttgagacagaagatcataaatggccacaagtgaggcaaacaagagtgcatcgaattcggtaagccgctcttcagaagacagtttaatgacatggctctccccttgtaaaatcacaggaatgaaaacaagtttatctttttctccgtagtaaacatcctgtctttccagtgtcgctcttaccgtcgtgcggtctttgaaatgcacaagcaaatgatctttatcgccttgtgtcatgaaaggaaagacgcttgcttggatttccgtcttgtcggccaaccttgctagaatttctctcacaccggtaatatatgcacgctgccctccgtaatagacgttaatcgagtcactttttagtaaacgaaaaaaagcttttagcctgtcttgctgcgctttgagcacttggtcgtttgcttcaatcagttggccggtatcgattgtaaacacattggaaccaattcgttgcacgtacgcgctcaaaaacacaaaggcatcgacaacaacgaaaagcaaagcaacaatcagatagtgattccattcagtaaaaatactttccgggtaaaacgtccatgtaaatgctgctccagtgacaaaccatgcataccataatcttcgtatgatcgggagccgttttttcgtctcctcttcccaccgccaagacgcaaatacatatagccccagccctaatacggtcaaccacacaagcaattgatacagcagaagcatgtgctcaccccctatttttgcatgctgttataaagtctatgacagcaactggacaaatagaaatatttcccaacatggatttgcatacaaaaaaagcttgaccattttgatcaagctttttcaataacactattaggaaaggagcccaaattgctcagcaaggagacgaaacgattcatattgtttctgctcatcgtaaatagtgctatgcaacatgaactcgtttgtttctgttttttcggcaaatcgcagcaaccggtcatggacatcagcagctgtgccaataaaagagccacctaattgttccatcaccatttgtttttcgtaaggtgtccatatgtcatcgatattttctacagcaggtttcagcttgcctggccggttgcggatcatcgccaaaaactgctggtacagactcgaagcaagcacttctgcctctttggctgtttccgcaacaatcgcgttaaccgccaccatgctgtatggttcagccaatacagcagaaggtttaaaggattctttataaaccattaatgctggcatcatatgttgaggtgcgaagtggccagcaaaagcaaacggcaaccccatttcacctgcaagcctagcactaaacccactggaaccaagcaaccaaatgggaatattttctccttctcctggataagcgcggacgcgttttgtcgtgctttctggttggaaatacgcttgcagctcttctacaagctcaggaaagtcatttgcatcttggccgtggcgtctaagcgcatgggccgttagctggtcggtccctggcgcacgtccaaggcctaagtcaatgcgccctgggtaaagggcgtttaacgttccaaattgttctgcaatcgtgagtggggcatggttcggaagcatgatcccgccagaaccgacacgaatcgctttcgtggctcctgcaatttgcccaataagtacagccgtagcagagcttgcaatccctggcatattatggtgctctgccacccaaaaccggtggtagccgaattcttctattttctgggctaatttgattgattgccttagcgcgtcgctcacgcccaatccttcgcggacaggagccaagtttaaaaccgataatgtcacacttgttttcattataagccctcttttctatatgtgcgcttcgtctttattgtagcgaaggtaacgagacgtttcaatgtagacgaattgactttgccgcttcagttgcgataaaatgactgataatcagtcagaggagttggctatggataaaaaacaaaaaatcattgctgccgcactcgaagagttccaaacgaatggcgtcgaaaaaacgaaagtatccgatattgtgaaacgggcgggcgttgcccaaggaacgttttacctatactttccgtccaaacttgcacttatgccagaacttgcccgaataatggttggcaagacattggaacggattgaacaagatgtcaccaagaaagaggattttcatagcaagctgcatcagttaattgaaagcacattttcgttgacaaaggaataccgggggattttcgcgatcatttacacaggcctagcagcaagcgattatttgcagcaatgggagctgatttatgaaccttattacgaatggatgaccgcttttcttgagcaagccgacaaacaagcgacaatccgccttccccttcctgccacccgttttgccaaattagctattggcttaattgaatcagccgcagaacaaacgtatttgtatgatagcgggagtgaacaagaagcatgcaaaacaattgcagacacgtatgttttcttaacgcgcacactctgcgctgataaaccagcatctttttagaaaaattacatgtagaaaaggatttgacaatcatggctagtaatcgcagagatttactggaaatccgccctgttaggagtgcggacatgcagcaatctattgatctgttgaactatgtcttccaagtgaccaaccaagatgtttccgaaataggccaacaacaaatgcaagcatggaaaaagccaattattgaacactgtgatgtgataggctggttctcaggcgatcaactcgtttcgcaaatggtcgtctacccattttcggttaacatccatggccaaccttttcaaatgggtggcgttacaggagtgggcacttatcctgaatatgcaggccttggcttaatgaatgacttaatgaagaaaagcttaacaaacatgaaaaaccgcggccaaacgatttcttaccttttcccttactcgattccctattaccgcaaaaaaggctgggagatcatttctgatgtcattacttacacggtaagagacacgcaaatccctaaaccttatgatgttccaggccgaattgaacgggtcgaatttgcagacaaagacatccgcacggtgtatgcccaattctcgcataaagcaaacggcgcgatgattcgcaatcgccttgcttgggaggagcattttaaatgggaacgcgacgaactgacaggttgtgtttactatgatgaacacgacaacccgacaggctatatgtattacaaagttgaaaacgaaacgttttatgtcaaagaaatgatttataacaacgaagaagcccgtcgcggaatttggaatttcattggtgcccatttttccatggtttattacgtaaaaggaaagatctttacaaacgagccgttatccttctttttggaagacagtgaaattgaagagaaaatctctccttattacatggcgcgcatagtcgaagtagatcgtttccttgcctcatttccatttacctcgcacgcgagcggcaaacttgcttttgccatttctgatccgctgctagagtggaacaacggaacgttcgtcctatcatttgccgaccaaaagagagtaaccatcgaaaacggtgtaaaggcagacgttaaaaccgacatccaaacactcgttacgcttttgttaaactataaaagagcatccactttaaaagaaataggccgtctcgaagcgaacgaagaaacgatcgcctatttagaagcgatcattccggataacaaaccttggttttcagattacttttgaaagggcagcgttttattacacgttgcctcttttgtacggccaacatgttaaaaaagtagattttaaaaaacagcaagcgatatagcaatctctctccttatcccccgccaaatatagagcatttctaccatattaaaacaagaatttccctactaatatgatatttttccagaaaatccgtgtctattcatgctgaaatattacgagaattgtaggtaaagaaaaccatttgtaaccgtattgtaattttatttaaaagaaactgtgatgttcatacgttaaattaggacttgggaaaaagattatatgaaatcaaatcaagtttattaatttacttatgggggaataataatatgtttaaggcaaatatgaaacaattaatcgtacgtacttctgttgtagttggactagctggcgcagcttctgttgccacaagccaatctgcagacgctagcgttgacatgaacaaagtaaacgcagcagaaaagaaccaaaaccaagcacaatcagaaacaacgtctgaatcaaatacagcttctcaagaacaatcaacttctacgactgtccgtttcggcgaccgcaacgaaactgttcgtgaagtccaagcaaaattaggcatccctgctgacgggattttcggaccgcaaacagaaaaagaagttcgcgaattccaagcaaataacggccttgcagctgacggcattgtaggtccagctactaagaaagctcttgataacggtggacaagttgcctctgcttctgaagaaagcactacttcaaatgaaacagcttcaagcgagtcaactgcttctgtttcaactgcttcaacatctgaatctgactcttcttctaatgaagtaaatgaagaagtaagcacttccgttgctggtacatctgttacaagtgctcctagcaacagtggcggtttagtaggagttgcgcaaagccaaattggtgctccttacgtatggggcggaacgactccaagtggatttgattgcagtggcttcatcaactatgtctataattctcaaggaatttctattccaagaacagcacaagccatctacgatgcatctgctaaaacgtctgaccctagccctggagatgttgtcttcttcacaggcacatacaattctggttcgtacataacgcacgctggcatttatgtaggaaacggtcaatttgttcacgctggttctagcggtgtgcaaactgcaagcttgagcagctcttactggagcagccactacgttggcgctggaagcctccgttaaaaacaagccctcatattgagggcttgttttctctttgatggcgcctcaaaaaaagaggagcatccgcccctctctttcatccattctctgtccattttgatacatgcttgtgacgatacccttttaaccgttccaataacgcttgcggttctttctcgacgataaacaaatctcgatacgcttcagccataaacccttgttcaatcgtatgatcaagcatggccaaaagcggattaaagaaatcggctacgtttaacaaactgcatggcttttgatggtaatctagctggatccaagtaaacacttcaaaccattcttcaagcgttcccgctcctcctggcaaggcaacaaaggcatctgcatgctcagccataagcgctttccgctcgtgcatcgtatcgacaacatatagctcagacaatttgtcatgtgcaatctctacattttgtagttttttgggaattacacctatgacacgtccccctgcttgcaagcaagcattggcaacggcccccatacaacctacttgggctcccccataaacaagggttatttcattttcggcgaggagtttgccaaaggctgtcgcctgttcgatataaactggatctttgccagcactagacccacaaaacaccgctaacgattgtatttccaattctcccattcctttctctgtcctcacattcgatcaaggccgataagccgatacagcacgactgttcccatcaataaaccgccatgggtggtggctgcatggaccagcgcctttaatgccgatacgttttgtcgccacaatggatgcgtttgtgtggtcccctttcgcaaaataaagcggaggttcggttaaaagccggccatagtctgccattgtaatccccattgcttttgttaatttacctggtccatttgcaaattcacggcttgtatgtggtttgcctcgtagccgctccatttctttaacgccgctaataggttcaatggcacgaatgagcacagcttcaggttgtcctttttgttcacatacaacgtttaacaaacaatgggtatgcatcgtatatgtgtaacatcttccagcctcttcatacaaaatagctgtccgttttgtccgacgcctgccatagctgtggcacgctcggtcaagcactcctagatatgcctcggtttctgttattcggccaatcaacgttacgccgtctaactcatgtaccaaatgcatgccaatgagcccttttgccacttcgattgttgattgctcaaaaaaagacagatcgagcgctttttgttgttccattgtgacagtcctttctccagtcatcctcctttatttaagcacagattggccgttattcatagtgacgcacatctcctacaggcaaaaaccattctagcccgccaagcaaggcacttgcgcttacgaacgcaaggcatgtagtaaggaaaaggacatcccattttgagtagccgattttataaaaatacgttcgtttcgctgccccgttaaactgtttagcctccatagcaatcgcgatccgttgcgcacgccgtatggcctgcgccaataatggaacactaaaaaaacgcattttctttaaaaagcctgttgcgccttttccaagatcaaggcctctaatgcggtacgcatagtgaagcgtttgaaactcgcttaccataataggcagcattcgaatcgaagccataaacgaataggctatgtttgccggaagttttagttgctgcatgagcgaataaaacagcagcacaggttttgttgttaaagcaaacaatagaccaagcacagcgaatgtagacgcacgtaaacctaaatggatgccccggtaaaagctttcctccgttatatggataagcccataatgaaaccacgtcgtctccccttttccgaataaaaccatcgcgctggaagaggaaatgaacaacaacaaaaatggcagacagtataacaacacaaacttgcgaggatggccagaaaagcagaatagcaaaaatagcgatgccagaaacaagacaagcaatgcgttaggattatgcacgaaaataatcgcaataaaaccaataattgttgtcactaattttaaactcggattcacacggctaagccatgtctctttccatttgtattccacctacgtcacccctgttccatttcgcgtgcgcgccattattgtatcaagggttccgtttttaatcgtccattcatgcgtggcaaaatggtcaacaatcatttcatcatgtgtcaccattaagatcgcagtcccttgcctgcggcgctcttctagcgcttcaagcaacaagaatgtattttttgcatcttggccaaatgtcggttcatcgaacagcaaaagcggccgcggctccataaaggctgttgcgacactaaggcggcgcttttggccaatggaaagcatatagggatggttgtcttgtttgtctgctaattggaacatctcaagcaacgattgtgcttgggcattggctgattccctactacagcccgccaataactcttgccaaacagaatcagcgacaaactgaaattctgggttttgaaaaacaaaaccaatttgctcagacagggactgctttggtttgacagcttccccatttagctgataggtgcctttccatttgagcaaattcatcaaagcatacagaaaggtcgatttcccagcgccgtttttgcccgtaatgcaaacccagtcgccagcatggacaaccgcttcatccacttttcctactcgttgtttgccacgataagcagcccaatggttaagcaacagaagcggcgtgtacctcttctgctttattttgcctggagcgtattgggacaaatagtttttccatgaatatggatgccagattccatattcgtcaagttggcggcgatagcgctgaaacaattcctgtggagcgccatcgtcaagcaattggccctcttcattaaacaacacaatccgatccacaaaatcaatgatttcagaaattttatgttcaataataataatggttttgccgctgcacgcttgacggacagtctgccatatttgcgtggttccctccggatcaagcaacgctgtcggttcgtcaagaaaaagaacatcgctttcagccgctagtgcgcaagcaatagcaaggcgttgtttcatcccttgtgacattgcagcaatcggccaatggcgctcaggtaaatcaaggcctacttgtgctaaaaggcgctcgatcgccacatccatttggtcacggggcatgcggcggttttctaagacgaacgcaatttcttcatcgacataaggcatgcaaaattgcgtatctggatcttggaatacaatagcaggctgcttggcggtaacaagcgcttcagcatgataagggagctcaatcgcactggggatgaggcccgccatcatatgcgctaacgtcgattttcctgagccacttggaccaagcagaagcactttctcccctgagtaaatatcaatggacaagtcttcaaataataacgtgccgctattcggataagacagcgacagctgcttgatggacacagcctgttctctactcatcctttttactccttttcgaagcaaacaagtcgtaatcggcttgggaaacggggcgcaaaagcgtactgacgcctgtcttttccagtgcccgtacaagcgcagaggctaaaaagccagcaatgataatggagccaagcgtgcgaaaaacaacgcgcaatgtgatattccaagtcgttaaatcactcaaataggcattaaaataatcgagcccaagggaggcaaacgaagcgaaaacagcaccaaggctagctgtccatactgtatatacgcggtatttgaatagggcaaaagccaactcgattccaagcccttgcaaagcgccgtacaacagcaacaacggtccgtatggggacccagcaaaaaattcccctgaagcggccgcggtttcggcaagcaacgcaacccctggctttttaatcagcaatgctgcaattgttccggcaataaaccacatgccatacagcagctggtctgcttgcaaccctgggaggctgactaagtccgtgaccggcgtccataggcggtatacgaccgcaaacacaaccgaaatcaaaatcgtcacaatcatgtctgtcaaacgtaagcgattcttgttcattttctgtctcctttttccactggaaagggcacaaaaaaacgctcccccgaaacggatggagcgacgcacacgaccctgccatgggcaaaccaaagcagcgcctattgtacaccgcacttcccttcgctagcattacctagatcaggtaaagggttaaggctaaacgcctttctcagcataaacgcacccctagtggttgtaatttatcatgttatttaaagttaaccatatgtttttacaagctgcaatcttttttttcggcaattacatttttaatttcgcttaaacgacgaatttcataggttggacggatgtcggttgtgttttcaattccatcacgatttagccaaatcgtttcgattccagcttggtttccgccaagaatatctgtatgcaaattatcgccaaccatgagcacttcctctttcgctgtccctgacaattccaacgcatgcttaaacattgctgcatccggtttgcctttcccgtaagcgccagaaatcaaaatatggtcaaaataagggacaagttgaggagtgatctccaattttgtattttgcagatcaggagagccatttgttaaaagcaaaagcctgtaagaatgttgcagctcatcaaggactgcaaacgtatcttcaaacacatacgggttttttcgccgttctgatggaaaatggctcgccaattggttcgctaattccccatcttctatgcctatttctgctaaccctttttcccaagcagcttgttggtacacaggggcaatttcccgtaggcggttaaagtcttccgtgtcatcacggaaagctccccacaagccttcaaaaggatttatgccaatcagttttgtaaactcgtacgtttcataggattgatatagctccgtggcatgagtacgcaccgcttcctctagcgcgtctgggtcaatatctgtatggaccgttgccgccaaagcgcatgtctgcctaaacgcttcctttatgctttttttatcccataataacgtatcatctaaatcaaagaaaatagctcgtatcatacttgcctccgggtttggttattcctcgtcttccaaacggacagtccagccaaacggatcttcttgttctccagtttgaatgcctgtcaattccgtgtacaaacgtttggacaacgctcctgtttcattgttgttgacaacgattttgtggtctttccacaaaagttctccgactggagagatgaccgctgctgtaccagttccgaagacttcttcaagcgtaccgcttttgcttgcgctcacaatttcttcaattgaaatccgccgttcgaacactgggatatcccaacttttcagcaactcgatcacgcttttgcgcgtaatgccctctaaaatgctgcctgataattcaggtgtatgcacttctccgttcaatttaaaaaacacattcatgctgcctacttcttcgacgtatttcttttccatcccgtccaaccatagaacttgtgcttgtttgttcgctgtagcccgctcttgtgctttgtaagcagcacagtagttgccagccgttttcgcggtcccagtcccccctggtgcggcacgggtatattggtcttctacaaaaatgccaattgggttgattccttctttatagtaagctccgactggtgacaagataatcataaatttataattacgtgaaggcgctacgcctaatgtaggttctgtcgcaataacaaatgggcgaatataaagggaagtgcctggcatcgttggaatccagtctttatcgatacggatcaattcctttaaataagcgagcatttgtgcttcatcaatcggcgggatgctcaaacggtcgcttgattgattcaaacgcttaaagttttcttctgggcggaataagcggacgctcccatcttcagagcggtacgcttttaagccttcaaaaaccgtttgcccataatggaataccattgcggcaggatcaagggtcaatggttgataaggaataatacggggactgtaccagcctttctcttctgaataatccatgataaacatatggtctgtaaaatacttgccaaactctaaagcagaagactcgggtttttgttttttgtgcgtacatttcataatttcgagtttttgtgttgtcatgaacgagcgctccttcattttttctctagtaacatcgatgatatggtttaggaacaagacgacaaacaaaaaaatgcttaccctttatgaaattgatcgaatcgtctattctccccaataaaaactgcttaattgtctatactaggcaataaaacaagttattattatccctttactatatcataatatcacatattcaaacagctttttgctatcacctgtaattcttcatctatgatttcgtttttttgctgggcgaaatgttggttttgggaaacattgttccatataagccatagtgctgcgagcagcgaaacatgttgctgtagacccactcgctgcctgtttgataggataaagaaacgcaaagaaacaccatattttttggagaaagggttagccttgatgaaacgatatgaagaactaaaaaaaggggaatccggcgcatggcttagtataggcgcttatatctttttggcagcggtcaagctgacaatcggctacttgtttttttcgcaagcgctcgtcgctgatggatacaacaatgcttctgatattattatttcaattgctgttttaattggcttgcgcatttcccaaaagccgcctgacaaagaccatccgtatggccatttccgtgcagaacatatttccgccttgttggccgcgttcctgatggtaataattggcattcaagtgttgattgaggcagggacgacccttcttagcgcaaatgaaacagaagcgccaagcatggtcgctgcatggacagcggcaggaggcacggtcatcatgttttttgtctatcgctacaataaacagctcgctgagaaaatcaatagccaagctctcgctgccgccgcgcaagacaataaaaacgatgcactagtcagtttgggggcgctcatcggcattatcgcttcccatttccatttaggttggcttgattcattgactgcgttgctgattggcctcattatttgctatacagcttggaccatttttagagatgccacccattcattaaccgatggctttgatgaaaagatgcttgaagtgtacagagataccattgaggaaaatgagcaagtccatctattaaaaatggtaaaagcacgccaagttggcagctccgtttacgccgatgtaacgattgaggtaaaacctactttaacggtcaaagatagccacgacattgcggaccaaatcgaacgggatttgcgcacaaagcataatatcctgcatacgaccgtgcacatcgaaccgaaaaaagaggataaatagaaaaaggaagcgcactgcgcttcctttaagactatagacaaacactcaagtctgtcgcaagttgcctcaaattattgatccttttctatgcctgcactcctcgtctaacaacggttttctattagacgacatgatggtagccaacgcagagcctgttattcaagcaaagtgacagtcacttgttgcctgccgaatgcataagcatccgcttctgattgcatataaaggtcgatcttttgtcctttaatggccccacctgtatctccagcaatcgcttctccatacccttctacatgcacacggctgccaagagggatgactgctggatcaacggctactactttttgatttggattggcacgcaaatcgatgcctgtcgctgttgtacccgaacaaccatggcaatacgctgtataagcggttgcttccatctggaaagtctttttgccttcgcttttgtgtgtagaagaagccgtgttggctggctcttcctcttttttctctgttggctgctctacgtcaccatttgtactttcgtttagttcgttttcttcttccccattttcacttttgtttgattcgtttttctctactccattattgttttcattggctttctcacttttcttttctcgctgttcagcaggttctgcctcactgtaatacaatgctttaaaggttagcgggccagcgataccatctactgctaagccgttctgtttttgaaaagcggtcaccgcagcttttgtcaatacaccgtagtacccatcaatgtctgcttggtagtattgcaactgcgctaattttttttggagcatgttaacaagaagcccgtcgcttccttcttgtaaaacagccattgaaccaagggtttgcaccccagcaatgccgtctactaataagttattgtcttgttggaattgcttaactgctgctactaccttactgtcatatgtatgggaccgatcttgatcctctaagtagccgctctctacaagatagtcttgtagtttctcaacgcgttcgcttttttcaccttcgtgtattggactgaatgagtcagcgtctgcctgttcaggtacactaattaaactaaacaagagtacgctcataaagaagaaacaaagttttataggcatggtaactctccccttaattttagcgcttttttcaacaggttctcctaagtggcggcggcgtctttcctcgtaagcaatattcatcttgttcgcctcgctttctcgtaatctgctaccatacctactcactcgtgtccctctttaacccacgttacaagctttttaatctgaatgtaacttagctgtaacataaaaaacgatgcgcccatagggcgcatcgttcgcattctcttactagtctaaaacagtcactttgacagttttacggccaaaattaatggcgtcgctttgagatgggacaaagacatcaattttattgccgcttatcgcaccgccagtgtctccagcaatggcttcaccataaccttccacgtacacacggctgccaagagggatgacacttgggtctaccgcgatcactttttggtttggattcgcttttagatcaatccctgttgctgttacacctgagcagccattgcaatcggctgaataagcggtagcttccatttgatacgtagctgtaccttctgtagtcttagagtcttcttccgttttaggagcttcttcagctggttgttcgcttttagcaggagccgattcttctgctggctcttctttcttactttcttgctgtgtttctggttctgcttttgcttgtggttcagcttgtggttcctctaccggttcttcctctactgtttcaagcggttcttgattttgctttgctttcggttcttcgcttgtttcttctgactgttgttttggttcagcttgcttttcttctacttttattggctcggctgaagctgccttttgattgtaatagagcttgctgtatgtagccgggccagcaataccgtctactgcaatcccgttgtcagactgaaagttttccactgcccgttccgttaaggaaccgaaaagtccatccacttcgcctttataatagtttaagtttagtaattgtttttgcagttcttcaactaatttgccttcatcgccatgctcaagggcatgcaaggcacctagtgtttgcaatccagcgatgccatccacaagcaaatcctcagatgcttggaattccttaatcgctgatgccgtggagtttccaaatgttccgtttatatcttctttatcaaaaaccccgttgtctgtcaaaagtagttgcaattgttccacttgctcgccactgtcgccttgcgaaagggtgcggtctgacatggcgttagccattgttggtgcactgaagaaaataactcctgcagtcacaactggcagcccgatgctgcgaaagactttgaatggaatttgttttttcaaagtagtgcctccttcaattacttgctgatatggatagtaacagtcttcaggctaggagacaatcgtcttgcgctcttcttaaacaacacgaaatcaaactgtaataaaagttaattcagggacatataactggcactttcttccctaacccttccgccttattacataattactcacaattagccgcttttgtacatttttgtatcgttcttgtcatgaaaagacgctatagccaagaacacaaatacaaattctgcttatattttgcttaaatctgcttatttcgcttgtttttgcgattacaattgaaacatagctgtcatataagcacactaagcgagcggctgcataatctgcaataaacgcctaatggcccattctaataaagtcccctttaggtcatgtaactaaagaggacggaaagagggattatggattatacagatatgttagctgcatttggcattggcagtgcccacccgggagggtttgcggagtctaaaaaaatgatcgtcaatatggatattgatgatcataccgtcatccttgattgtggctgcggtaccgggcaaactgctgcttatttaaaacaaatttatgactgccacgtttgggcgattgagcgacaccctgtcatgctgcaaaaagcgagacagcgcttttctgaacaaaatgtggctgtatctttacatgaaggatcaattgaagcgatggatttccctagtaatagcgtcgatattgtcttatcggaatcggtgctagctttccttgatttagagaaagcattaaaagaaataaagcgagtcttagcctttgatggaaaaatgtatgcaaatgagcttatatgcacacaatctctaacgtcagaggaaatcgccgaattgaaagaaggttatggctttcggtcactcttcaccgcacaagattggatagcagctttgacagagaatggatttagccatgtaaaagttgtaaaagaagcagtagtagaagcggtccaacaagatgaaagcgataaaggcaatgaccttatgccgtcaccgcttctttcccctgattgttttgcgcaaatgcaacagcaccaaatgaggatggaaaagttcaggacaaaacttggccatgcttggatcatcgcaagtcggtcaacttaaggtttcttaagttgaccagcttgctgaaaaacgcttacatatggtatgttcatatcgatttatatgaaagcaagtttggaaaggaagaagaatatggcaaagcagaatattggcgtcgtcggcgtcggtgtcatgggacgcagcctagctttgaacttggaaagcaaagggttttctgtctctctttatgacgtctcagaagaacggatcaacgaaattcttgaccacaacaaaggcaagcgtttagtcggtactttttcattagaagagtttgttcattctttggaaaagccgcgcaaaattatgcttatggttcaagctggccaagtcacagatcaagtaattgattccgtgatcccgctattagataaaaaagacattctcattgatggcggcaatacttattataccgatacaatacgccgctcccaaacagcagctgagcatgggattcactttatcggcacaggcgtttccggaggtgaagaaggagccctaaaaggcccgtccattatgccaggtgggcagaaagaagcctatgaactcgtcaagccaatgtttgaaaaaattgcggcgcaagtaaatggcgaaccttgcacgacttacatcggccccgatggtgctggccattacgtaaaaatggtccataatggcattgaatacggggacatgcaattgatttgtgaagcctattcgctattagtaaacgtgcttggccttaatgctgaagacttgcacagtgtatttaaggaatggaatgaaggagaacttgatagttatttaatagagattaccgccgacattttcacaaaagtcgatgaagaaacaggaaaaccgatggttgatgtgattttggatacagccggtcaaaaaggaactggaaaatggacaagcaaaagctcacttgatctaggcgtacctcttccagttattactgaatcggtctttgcccgcttcctttccgctatgaaagaagaacgcgttaaagcgagccaaatattgtcaggcccagagaaaaaacaattcacaggcgataagcaggaattaattgaacgaattcgccaagcactgtatttcagcaaagtgctttcctacgcccaaggattttcgcagttgaaatcgatgtccttagaaatgaattggaaccttcaatatggagagatcgcgaaaattttccgcggcggctgtattatccgcgctgcctttttacaaaacattacggatgcctttgagcgagatgccaacttagacaacttgctgcttgatccgtactttgaaaacatttccagaaagtatcaacaagcactgcgtgaagtggtagctctagcagttgaatatggcatccccgttcctggattttcgagtgccatttcttactatgacagttaccggagtgagcgcctgccagctaacttgctccaagcacagcgtgattactttggcgcccatacgtatcaacgcattgacaaagaaggcgttttccatacaaattggcttgactaaggcggctagtaacaacaaaaaagcttggtctaactattatcaagacctaaactgaaaaagttagataattagaggacataacatattgtatatgacgaatatgttatgtcctctctcactcagcgaacacgccgatgtttaattaatttatttcacaaactcttgcttttctccttcttttatggagctggcaataacttcacattttttaatagcccaattgtaatgattaaaagtgttggctgcaaaatagctatataagttacttgttttagtccatttataatatttctttgtcatgatttcttcatttgtatgtaatcgaattagctccattactctttcatgacttaacttcaacttttttatagcctgatttaatgttacatcttgataattttcccaaatttgcatattaagtaacttgattgttctccatttataacctggtgcaggcataaaaggaacatctccatccataccctctctataccatctttcaagcattgtgtgccattcatacaggtgcataattatatcacggaaattcttgtctctttcttgagtttcaatagaaatagttcgttttctgctaggcactgattcaattatttcaagcagcgctttaaaacttttgtcgctatccaataatagattttcttttttacttttcattccccttaaaatctccctttttactatatattatcataatatgtacaacctaatctaactaacaaaaaaagaggatatatgctcatataaagaacataatatccgcttattcgtttagtctattcaatttttcagccaagcttttttatttacatttcttcaacaggccaccatgaaaagccgtctgcttcaagaagctcatccgcttctttcggccccatggacccagctcgataggttggcagtttttctccgctttctgaccacgctttggagatcgcatcaacaagcgaccatgacaaactaacttcatcccaatgggcaaagtttgtggcatcgcccatcatgcaatcaaagaggagccgctcatatgcctcaggcgtgttaaaccggtcttcgctatcatgcctgtattgcaaatggacaggcgttgtatctgcggagccaatctttttgccgttcaaaacaatcgtcatgccttcatcaggctggatatggatgatcaacaaattcggcccagtctgtttgttttccttgctatacagatttaaaggtagttccttaaattcaacaacgattttcgttgacttcaccgccatccgctttccagtgcggatataaaaagggacgcctgcccaaacatgattgtcaatcattaactttgccgcaacgtaagtctctgtttttgacgaatcactcacattttcttcttctaaatagccaatcacttcttgcccattgatttcccctcggccatattgcccgcgtacaacattttccttgatgctctcgccgacaatcgggcgcaatgcgcgtagcactttaattttttcgctacgtatatcatcggtggacaaacgaagaggtacatccatagccaagagagacaccatttgcagcatatggttttgtaccatatcacgaagggctcctgatttttcataatagccgccccgtccttcgacaccgagctgctcactggaagtcacttggatattagcgatatgccggttgttccacaatgaaccaaatatggcattggcaaaacggatcacttgaatgttttgcaccatttctttgcctaaatagtggtcgatccgataaatttcatcttctgaaaatgcctggcgtatttcgtcatttaaacggatagccgattgcaagtctgtgccaaacggtttctcaatcacaagacgcgtccatccttgcgtgtcctttagcccttcgttatgtattgactgtgcaatttgcccaaaaaattcaggtgccattgccatataaaaaatacggttcccaggaatttggaatgtctcatccaaaatatgcaacttgtcattgagctcgctataggaatctttgttggtgacatcaaatgatagataggaaaaatgctttaaaaatgattcagtcacttcaggacgttgctcgccaagttcttcttggatcgattccatcacgactgttcttagtttttcatcatcccattcacggcgccctaaacctactacagcaaaatgttcgttcaaattgccttttctgtataaattgtatatagaaggaaacaattttcgttttgctaaatcacctgtagagccaaaaataacaaaaaccgcttccgcttgttcgatctggttcatctttttacctcttttcttgactgtctttttcttctcttgataagcaattggcaataggtgtttgttgcccttccccattataccgaaaatggtgctcagacagctaaaatttgcttagcaaccatctaactttcttcctttaatgctttgctgtacttatctaaaaagattttttctattatacacttgattaacggcaattgcactccttgtttttttgtgtttggattgatttaacagcctcattccgctatacaataggcgtaagctgtgttatagtagaaagtgccttaataatttccccgacattctgccttttcccagcagaatgtttttttatattcagcgtcttcctctcatagttttttcccattttccaattcatactccttttcctcaaatagctttcctttgcttttttttgttgtagcttattgtttcgtttttaaatacggtatgtgaaatttttggtttggagaagctgtagttgggctatttaatacagtacgtgaaattaaaaaacaaatggctttgcttttttgattcttcgcgcatattttctctttacagtgaatacgttctttaaaaggagctgattggcatgtacggaaatggcgaatgggttatttacaaagcaggccgcgcacgcattcttggttggattagcgaagcaaaagtggtggcgtccaattcagcgaacacccccatcaaaacaatttaccaattccataccaagcagcgtgtcttaaatggtaagcagccgcttttggcaaatgaagatgacttgcaaacatgttcccccaaactgaaagccgatgatattcgcgcacttcaagagattgcccttttgactaaggacaagcaatggtttctcgaattaagcaacgctcaccattctcatgcttaaacggtgaggtagccgacttagtcgacaaaatcattcagactgatagaaaacgtttgtcagacgaggagtgcagccgagggaagatgtgaatagaacgggggttcatgagcatatgaccgaggcaaacgacgaagtatgcgagcgtttgtctacagtctgaaaggacggcacaaagccgccctttttattttctcgctttcaagatgaatcgatgctgtgtcgtttcaaaatacccgttcttttttatctcctggctgatatgatccaactggggcagatggcgttccacagaaaagcctggtgcttgccagggaatcgcccgcaagtaataaataagcgcaccaatatcaaaaaaacgctgctttggaaaagccttcctcttagcttcaacgctgaagccgtgtgcaactaagcggtcaacggccacttccagcttccattctgcaaattcagtatttaaaggaagtgaaagcgcctcgttgatttctttgcaatcatcaccgccagcctgttgggtaataaacgttccacctggttttaatatacgggctaattcttgctcgctgtatgattcatgacggttgataatgctgtcaaaagcctcatcagaaaagggcagattgtcatcatcttctatataacgtacactgacgccaaacggagctaatgctttttgcgcaatttctacattgggctcatacccctctgtcgcatagacctttcctcgaaatggagcacacgaagacaaaaattcgccgccgcctgtgcccatatccagcactgtccgttgcttaagtgactccttgacccattcccgataagaccagtcgagctcatcctctttcactcgccctcttaactgctcaaaattccaaccgctaaatgactgcttcattgctgtttctacttgttctaaaaaggtcttgctatatgccatctttttgactcctccccataaataaacagatatatgccgatttgtcccgatttatgtggaggtcctctgcaccgttgttacgtaaaccctagtttgagcagcaactatgtcactcctttttcagcttcctttgttttttcctattgtaacatagctccatttattcgacttaaaccatttacagaacatacgttttcaaggtaaaataatgataatgaaaaatcatgttacaaaaaaggggaatgacctttggaaataaaaatcgccacgacacttgcagagttagaacaagcctttcatattagggaaagggtgtttgtccaggagcaacattgcccacttgaagacgagtttgaccgatatgaccatcttgatgctgcttgtacacatgtcattgcttatgacgggcataaagcagtcgggacaggccgtatccgtttagtcgaaaacgccgggaaactcgaacggatttgcattttaaaagactggcgccaaaaaggcgtcggcagagaaatcataaaagcattggaagccattgctttgcaaaaaggcgctgtctcgttgttgctccatggccaacaacatgcagaagagttttatcatcgtcttggatacgaaacggcttctgacgtctttatggaagacggtattccccatttgttaatgaaaaaagaagtttagcatctatgaaagccagcctgttttcattcttttgctggcttttttaatttagccgtctgatctgaatgtttgctaagcgcacttctattcgttgactaggtgtcccacgaatgtaatccaagtcgtaaatcatttcagcaattgccccttgaaaagacagatctttgctgattcgtaaatggactttattaatggtccccgcataatctaaaaattgttttgcttcctcgcctttaatttgatgaagaagatcgtgattatccatatcaacaaattcaacgatcatcgtgcttccccctatattccaatttatctattttatgttcttttgtttaacggcatgccgtttattgaaggaagccgaaaaagcacaacaagaaacacggttttcattggggaatctactattaggaaagcaacagcgtaccaaattccttatggccagcgatgcccatcgacaacgtttcagtttccataaacagcaggagaataattaagcgtttttctcatctcgcctaggtaatgcttttattgcacagctgtaacacccttaatctttgtatggatcaaattcattttcgccagccatacaaacaccaacaggctttaagcggtgttttattttaatcgtatttttatgagcagagaggaccgtatctaattttttatatacgaacgggctttcatctgtgcctccgccgcgcaattccactccaaacgcagcaagcgcagctgccatttgctcagagctaattgctccgccgctacggcgtctgttcttgcctttccctgtaaaacggcccgccgcctgtgtacggctcattaatctgccagcgccatggacggtgctgtaaaaagcgtccttgttttccttgctatcaatgccctcaacaatgactgaataatcacccatactgccaccgataaatccaagctgtcctggagcagaaggcgttgctcctttgcggacaacataaacgtctttgccattgtgcgtttccttccaagcaaagttatgatggttatgaacagagaacgtttcttttgcttgcaaaatggcgagcactttagcaatacaatggtctctgccggcatatgcgtattttccggctaagttcattgctcggatgtacatgtcacctaactcggaggcaacatcaaacaaagtcggtacatcctccatgctctccccgctaactttgctggcaaacggcttgtttttcgccaagttcaaaaaaccgctagctgttttatggcctaaccccctactgccaaaatggttcgcgacccataaaatgcctgtttcttcttccacaaacaaatcaacgaaatggttgccgctcccaatcgttccgagttggttacgcgccaatgtttgtaatgtgtctgtaagccccggttcaatttccgaaaacacatgccagtcaggatcagaaaacagttcatggtcaactggctgcttgtttttttggccaatgccgaacgagagcgtttcgtaaatttcgtcgagaagctgaggcagcgccaagcgaatctcctcgaaagtaacatttgtgcgcactgctttgttgccacaggcaatatcataaccgactccagaaggggatacttggccgtcatagacgacaacgcctcctaccggttggctgtagcctttatggtggtcagccattaataacgtttggacaacatcgccatgctggctgcagcgaacggcctgttcaacagcgttttcaagtggatctccccacacgcggacaccatcgatcgttttatacatatgtgtttccctctccatcccgtttgaataccatttttactgtatgaaagacatggccaaatagccgctctttaaattcgtttttgtaagcaaaaccacattttgtgtaaaagcgttcagcacgaaaattgcctttttcaaggtacacaacaagtggttcgccttgttttagttcgcgtacgactgtttcaaaaagcaatgtccctgctccaaaaccaagcatcttaggatcgacataaagggcagccaaatcggtttcgttttcacttctagtcagctgggcaaagccaatgactttaccagcctcttccgccacaaaaaaagcagcagaagagttgatcttaaccgacaagctttgacgcgaataagcttgctcgatgtaaacttggcggatatcagcgggaatcaagtctttatacgtgtcttcccatgaacgcttggcaatctcttggataaggacaatgtcttgtttttctgctttccttgttttcatttgctccctccaacattaaaagaaggcgttcagccttcttttaacgggtttgctttttcttgttcatggataatatcacggaaagcaaaatcgcctctttcaagccctttgattaaaatttcagcggtccccatatttgttgccagcggtacactttgcacatcacataaacgaattaaagcagtgacatccggctcatggggttgcgccgtcaacgggtcgcgcataaacaaaatcaaatcgaattgattctcagcaacgagcgccccgatttgctgatcgccccctaatgggccagacttaaaacgggtcacaaccaactcagtcgcctccatgatccgagtgcccgttgtaccagtcgcgtacagctcatgctcttttaaaatgggctcataagcaacacaaaaatcaaccaattcttgttttttcttgtcgtgggcaattaaagcgattttcatgtcgttctccccttaatcgattaaattttcaagaccatatactagcgtcgagagcttgaccacttgttcaacggcaagctttacgccaggcataaaactttcacggtttagcgaatcgtggcgtatcgataacgtttgccccactccgccaaacagcacttcttgatgggccactcgcccaggtaaacggacagagtggattttcatgccatcgaagtcagctcctcttgcgcctgccatctcttctctttcctgctcatgcccttgctttttcggagcccgcacctctgcaatgagctgtgccgtttttaccgctgtacccgatggcgcatcaagcttgcggtcatggtgctgttcaataatttcaacgtcattcatgtaccgtgctgccgtttgcgcgaatttcatcattaaaatcgcgccgatagcaaagttaggagcgatgatggcgcccagctcttttgcttcagccagtttcgttaaatcgcgaatatcttcatcactaaaccctgtcgttcccacaaccggacgaacgccatgctcaaacgccacttccatatgttttctaccaaaggcaggtgccgtcaaatcaattaatacatctggttcatgctccgcaaaacagcgtgccatatcggtatatactggcacatcgccttgttggaattcttgcaaaccttttaattgcttgccgtcattttttgaatcaactacagcaaccagttcaaatgattcttctcgcagacaaagtttgactgcttcttggcccatgttgccacgtggccctgcaattacaatacgtgtcattgattctgttctcctttttcttttttcgtccagcggtctttgtctcttgtttggaatttatgcatgacaagatcatgcgcttcgcttaaatcgatttgaagtgagttcgccaaacaaatgaggacaaacagcatatcaccgatctcttgttccatcgttttgtcttcttctgatgcttttttgggcttctcgccatagtaatggttcacttcccttgctagctcgcctaattcttccgtcaagcgggccaacattgccagtggactaaaatatccttctttaaactgccctatgtacgagtcgacttctttttgcatttctgcgattgtttttccttcaggcatcattggcacttcctttccccttctatcctagcgaaaagcacgcgcctgcgcaatttaaaaataatgacgtgatatttcttttttccgtgaagttgagtaaactaaggatggacgcgaaaaggaggcgattgcttggcagtcaaccggcacgttaaaaacatttttttcattttgctcggcacagcgcttatgtcgtttggcctcgtttactttaatatggaacaccaattggcagacggcggcgttacaggcattacattgctttttttctttttatttacgatcaacccggcaatcaccaacatcgtaattaacattccgttgttttttataggctggcggatgttaggccggattcctttttactatacactcgtaggcacattcagtttatcgctattccttgatttgttccagcgtatcaacttacatattttccttggcaatgacttaatgctggccgcattgttcgccggggccatcgtcggtacagggcttgggcttgtcttccgttttggtggcacaaccggcggcgcagacatcattgcgaaactatgcttgcgctattttggctggagcatcgggcggaccttttttgtatttgattcgtgtgtcattgctatctctctcgtctatcttgatttgcgtgaagcgatgtacacgattgtctatgtgtttattgccgccaaagtcattgactttatccaacaaggatcctacaatgcgaaagctgcctttgtcatctccgagtcgattacggagatctcagaagcgattttacgtgaaatgggccgaggcgcaacgacgctacaaggaaaaggcacatttactggcgacgaaaaagaaattttatattgcgtcgtcgcccgcaatgaaacggtgaggttgcgcaatattgtgcatcgcattgacccccatgcgttcatgaccatccacgatgtttccgaagcggccggtgaagggtttacactcgatgacaacaagcaaccgattcgaattggctaagcagtaaaaaagcaacagagcctgtcccttctctgttgcttttctttcttttccagggccattccccttcttcatttagcgctattttgctttggaccgttaccgtttttcgacttggctaggactgctctcttttttcgtcaaaccaaggcatgtactaagggccaacacgcttgtggcaaacataatcgctgccatcggcactgctgttgattcatcgatgccgacaagcggtgcaaccatcgctccaaggaataagggcaacatgccgagcatcgcgctagcactgccggcacgatggctttgtttggcaattcctaacgtaaaggaagaggttgtgatcattcccattgacgtcatgtaaataaaaatggaaacgacaattgtccataatggcccttgaatggccgccatgcagacaagaatagctgtagctgagctcgcaaccatcacccctgttttcaacaacgttcgttcatgaactatgccggctaaacggccaaccacgaatgtaccggtgatgatcgctagaccattgatgccaaataacacactataaacttgttcgtttacaccgtaaatgccttgataaacaaacggagtgcccgccacataggcaaaactgccgccatgagcgagcccgagtgtaagtgcatagccgataaaagaacggtctttaagcaaatctttgaatgtccataggatatgcgacaaagagcttggcactcgcttgcttggtggaagcgattcttctagctttattcctgcaacgagaacgattaagaccccgagcaaagacaaaaacaagaaaatccacccccagcgcgcccctggcaacagcaaaatcgccccgcccgccattggtgctaacatcggcgccacggcattgatcaccataagcaacgcaaagaattttgttaatgcttggcctgtaaaaacatcacggacaaccgcacgagacacgacaatcccagctgctgccgtaaatccttgtaaaaagcggccagcaatcaaaacgccaatatttggagcaaacgcacataaaagcgaagcagcggcaaataacgtaattgaaatgagcaatggccgtttccttccctttgcgtcgctgatcgggccgacgacaagttgcccgatcgctaaaccgattaagcacgttgttaaacttagttgtacaagcgaagcgggcgcatgcagatcttcgctaatttgcaaaaagctcggcaaatacatatcaatattgagcggcccaaggacagctagcattccaagcaaaaacgcaagcgccaacctctccattcctgttggattctgtttcattctgtctccccatttctgataaacaaactcagtctactttagggaaaccatgtttgtaaagggctttgccccaaaaaacgagcatggtctgttgacatttgtgcattagctcactgttaaagcgctttttcggggcatgcctgctcccaaattaagttaacacgaaaaaaccagcccaagtgaatgagctggtttcagactaagccgatttgttccgaccattagtcgcgttgtgccaagtaaatcataatgaatcgtgctagttcgagcaaagcgacaagcgctgctgccacgtaagttaaagcagcggcatcaaggactttctttgtttcccgctcttcgttgtttacaataatcccacttgccaccatttgctccattgctctgttggaagcgttaaactcaactggcaacgtaaccacttgaaataacacagcggtggcaaaaaagataatacccattagcaaaacagggtttccgccgacttgagcaccgacgccgaagagcaaaccggccaaaatcagccattggcctaaattgctgccgatggaagcaaccggtgccaaagcgctgcgaaatttcaagaatgagtagttttctgcatcttggatcgcgtgtcctacttcatgagcagcaatggccgccccggcaactgaagcgttgcggtaattgtctgttgacaaccgtacaactttggcacgtggatcgtagtggtcagataactccccttttacctcttcgacttcaacatcataaatgccgttgtcatgaagaattttccgggctacttctgcacctgtcattcctgcgctgttacggatgcgcgaatattttttatacgcccgttttacttttccttgagccagaagcgggattagaatgagaaacgctaaataaaacaaataaacaccgagactcattgaaatcacctcactttatcttaatactattatcgtaatcaaaacgtcaaagaaagtcaaacttcccgctatggttgcaagctcttttttgaacgaccgtcacagttttgacacattttattcttttgcttttactcgccgtttctcagcccggtatttccgataaccaacataagataaggacgcaacaagcggtccaccgatagacagaatcgcccataaaagcgatgggtctatcccatcctcgccactaccatcataaagttctttaaaagcgccacgcatcgtttcaatatgatcttccagttgctcaggggatacggattggttttctaataaagcaaaatacgagtcaaaacgtacgacggtttgttcagttgtgcttatgtggatagacggacgaatcatgccgtatagggaatgaaatgcatttatttggcgtttcagagcttgggcatcttttgacacagccgcttcctctagatcgtctagtgacgccatcacttgcgcttccgtgcttttccaaaggggttcgctgtttttggcaaacgcgtcaatcgcaaggcgaaacgctgtgacgaggcgaatacgttcatcatcaggcatatttgtagccgttaatgcatcttcagcattttcaaacgttgtcgttagtgtgcgtaacgaagacattgtccattcctggtcttcaaaatcataagaaaggaaaaaatcagcaaacacactcattagccgttttccatcttcataacgctgttctttcgttagcttcagcacttgatttgccgtatgattcaattctttccacgcttgggcatcattagcagagccaggcataggcagcatcactacgatacaaacaagcaaaacgagcatcatccaatgacgcatttcttgtccctcctctgttctaaacatcctatgaacaaaaggacaagagtagaccttagcgtggcaaattaatacgaagcgcgcgctggcgcacatttaggaagtagacggtcgctacacagacaagtcccaacaagaatgtaaaccaaccaatgccgtcaatataaggcataattcgagcacttagccacgggtgcatatgaaaatggtaatcgataaagtcgttgaagacggtccataataacgctgcagccaaatgtccttttttgatgcggaagtatggcatgaataaaagtgcctgtaaagccatgcctgcatgggagacattcagcataataatttgccaatgaagcggggcgccttccatcacttgaaacgtattcatgacaactgcccacacgccgtatttaagtaacgttacggcagcaagcgcttcgattaagccagattgcttacggctcaaaaagccaatcaacacaaacacaaaaaacaaacttgccgtcggactgtcaggcacaaaccagataaaatgcagcggagtggccgcaagctggtcgccataccagtaaaacccatagatcgtgcctaacacattaatgattagcagcaaccataagctgatgcgtttcgttaaaagcccatacaaataagctagcatgccagcccttcctttcatgaaaaaagccgcccatttgggcagctcttagtataacacaatcattcaggatcttgaccatggtttgcgatgaactctgccaaaatttgcagttcttcttcagaacccgtgaactggtcggcaggcatcgctccttgcccattttgaatgatttcaatgacttcttcaggtgttttttctgtttcaagcaagttcggcgctcccgcaccgcctgtcatttggtcgccatgacattggatgcacgaatcttggcttgaataaatttcaaacccttctgcttcctcatcaatttcggctccttctactagcttcccttgctgggcagcagcttcccagtcatgctggtccactgactcccatgtcaagtaaacaacggatgcaacaccaagaagcataatagaggtagcaatcgggcgacggtgtggccgacgttcttttgatgtatccaaccacggagcaagcagcaaagcgccgaatgcaacgcctggaataaccaccgtacctagtacattaaagtcgccagaagcaaactcatatttaagcaattgatataaaaacaggaaataccagtctggaagcggaatgtaggcttccaatggatcagcaattgcttcaagcggcgcaggatgggccacagttaaacataaaaagcccattaaaaagactgcccctaccatccattcccgcaataggaagtttggccaaaaagcttccgtttttccagggtattccgagtagtcttttggaatgtttggttttcggccatccgctttaacacgggaatcgccgacaaacttcattccttttcctcgatgcatgggtttccccccttagtataatcacatattagctaacaattatagcgggccagaaatgccttgacggcgaatcatgataaaatgcgccccaagcaaaccaagcaatgctgctggcaagaagaagacatggatagcaaaaaagcgcgtcaacgtcgcagcaccgacaatttcgcctccggcaagcaacgcttttgtaaagtcgccgatgatcggtacgctttcagcaatttgaagtgtgacgacagttgcaaagtatgctttcatatcccaaggcaacaaatagcctgttaagccaaggccaagcatcacaaagaaaatcaatactcctacaacccagtttaattcacgtggctttttgtacgagccggtaaagaacacgcgcaacgtatgtaaaaacatcatgacaataacaaggctggcgccccaatggtgcatgccgcggactatgacacccattgctacatcgttttgcaaaaagtaaacagatgcatgggcattcacaatgtccggtacgtagtacatggtaaggaacattcccgacaaaatttgaataacggttacaaaaaacgtcaaaccgccaaaacaataaataaacgccgaaaagtgatgagctgggttgacgtgctctggcacttcatggtcagcgatatcccgccacattggcgttatgtcgagacgctcgtccacataatcataaattttttgaagcatttctcgcgcccctcctaagttctttgactcacctgtccaagataaacttgattgccttccaccacgacttcaaaaacatcaagtggtcgcgttggtggcgttccggcgatattcgtaccgtcttcttcaaaacgccccccatggcatgggcattggaactcgctcgcatcctcattgtacgcaactgtgcaaccaagatgcgtgcatactgaagatagagcgacaactttatcgccgtccaaatagatgtaagcttcgtgctctacttgtgactcgtaccatgagtcaacttgcgtgaagctccacgtaaaccgctgcggcacatctgtcaaatcatccagttcacaaacgagctgcatatccgactccgcacctgcttttaaggcaggatcaagggcaaagcgaatcatcggcattaacatgccagcagccatgaaaccgccgacgccagtgagcgtgtacgataaaaattgccgtcttgatactttgtggtctctctcgctcactattttccctcctaacaacgttcataattgtgctccttttattctgagcattcttaacaagactaatactaggacgataccatcatactataaaccgcctacattgcgcaatataagttagaagagcgctttcagactttttgttgccaaagctgcgataaaaaggggatcagctgttttaactgcccgtccatcacttctttacggtgcttcgcttcaacaaattcgaggggaagcgctggcacaaaaaacagtgccatttcgtcaagctcgttttcagccgttttccattccccgtcagctgtcagcaaacaaatgtgagaaaatgaggctgcttttaaatcggctgcccatcctaacagcctgtcaatgcggcttgacaacggttctgattgggcataagtgaaagcaggaaattgcatgatccgcccgtgaaattgccgttccatttcatctgctagctgcgcagtaaactcaaccgcttgcgtcactgttttcacctcagtatcccacgttgttttcattagcggaataagagctgtgtctacatagtcagccgcttttaaatatgtatcaatgtctgctgcacgaaaccgcatatcatcctctccttttgtccttctatagtatagcaaaaaaacagagccagttggccctgttttcaagattttcttaagcgatttaactgttcgctcaattccatgaacgtctccttatcgccattgtcaagcgcctcgtcaatcgcttcagacagctttttgagttggaacaagcgaaccgactcctgtaaaagcgcttctgcttttcgctcaaatgcctgagccctttcttgcgtttctggcaagtacggattgtcttcgagcaccgctaagtattgcgggcacgttaagcgctcttggaagtggagctcaatatatatgtcttctgtttggtttaagcgaatgtcgtggaacgctttttcgcaatccgttgtaacatgatgctttttgcggaaagaaaatgggatttgttcaattccttgagcagaaataaccaaagcttttggcgtgccttcagaatggtttaaaaagtgaactcgttccattagcgtatcatcattcatcaagtagttcaaaagccaagcacattctcgccttttcagttgatggcgtttgagaaagctgcgcaaaaatgcttttttgtccatgactggaaccatattgctcattgctcactccccctttctgaattcgttggaaactttcctagctcctgcatacctgtaaattcgccttgccattgcctgaatcctttttctagccacaattcgttttctacaaatcacgctgtaacatgctactctgcttgcaattcatcgaggagttctgacaaatcactccgctcagggctttgttgcagcgctttttgaaaaagttctactgccttgtttcgctctccctcttccaagagaaagtgaccatactcgcttagaaaatctgcatcttcatgaaaagcaatataggcctctttgtatttttcccgtgccgtttcataatactccagctctttatgagcgagtgcttcgtaccaaacgagcagcgcatctgtttccccgtaggacttcgcatgttcgacaagctccagcagctcgtcaaatcgttcttgttcccgcaaaaacgctgctaatgtttgcaacgcctctgtatttgttggatttaaagcaattgcctggcgcaagtattgttcagcaccgacaaaatcctgttgtttatacagcagtttcccggcaagcaatggcagcgcatcattaaattcatccatacgcatgcccgcggccaatgtttcaaatgcttcctcataacgcttttccgcttcataagcgcgtgcaagcggcacatagacacttgtgaaatcaggatcgagtgtttttacagcctcaagctgttcaatcgccaccgtgtaatcaccttgctgaaaagcggtgaaaccaaaattaaacaatgcattcggcggcagttcattctgtttttgctggtggtatagcaagagcgcgtcttcaaactggccattagccccataagcttcggcaagcgccaaaccgacatttatgtcaccgagttcctcttttgcatgcaatgcctgttttaaatacgggatagctttattatatgaaccttgttcaagataaaattcaccgagtgcatacgtaatgatgacctcattaggcgcttttttatgggccgcgagcagtctttgctcggctgcttcatcaagagactgcaactggtataaatcagcaagcagcaattgtgcttgtaaaaaacttggatcgttttcgccgatctctaataaatactcaatcgcttcgtcttcttggtcggcgtcaatcatcatttctgctgccaaaacgtacaactccccttcatcagggtataattcgagcaattgttcaatgagcggccgtgctttatcgacatgccctagctcataataaagctctgctgcttggtagagctggtcatggttcgttgtatccgcaaacgcatttagcaaacggagtgcttcttctacattcccagattcaattgacgcataaattttcttttttatgtccacaaaaacatcatgctccttttgcatgcttcttgcctttattttatagtaagcaattgcgccctttcaaccattctgtttgcccatcgtttttaaaaaaatcttttatggcaaaacctgttgacaatggaagcgttttcgtttattctctaattagcgtatggtttctctccactcctatccatacattcttagctattatggctaaatccatttgtaaacgctttcgtttgcagatggattctttttttgggcaaaaaagcaagcacatggcttgctttcaaaggtggacactgcccgttgatttgatttacaactgttcacgcagacggaaccatttgctcctgtcctcgttctccatgcctacacgcctctgctacaatcgatttcgattcgcttggacgctcttctactgtagcgactgtaaatgctcaaaaaactgaggatacgatacagaaatggcacctatgtttgctaattctaccggcccatttgcgcataaagaggcaatgacaagcgccatgccaatacggtggtcgccatgggaatccacttttccgcctgtaagcggcttgccgccacggataatcatgccgtcatcggtcgcttcaatgtcagccccaagcttagccaattcgcctacaaccgtatcaatgcggttcgtttctttcacttttagctcttcagcatcacggataatagtggtgcctgaaatttgcgtagcaagcactgctaacaccggtatttcatcaattagcgtaggcacttcctctccttcaatgacaaacggtgagagctcgcttgttgatatcgtcatatctccccgtggttcaccacctgtcgtcacttgctcgtcaatcgacagctttgctccactccgctttaagacttcaagaatgccggcacgcgttggatttaagcctacattctttaagtggacgcgactccctggaacgatacagcctgcgacaagaaaaaacgccgccgatgaaatatcccctggaacaacgacgtcagctgcttgaagggactggccgccttgaatggaaatggtcttgcccgctgtcgtcactttcacgccaaaagcatggagcattcgctctgtatggtctcttgttgtttgcggctctgtaacagatgtttccccttctgcttgcaatcccgctaacagaagcgctgatttgacttgtgcgcttgctacaggcatcgtatactcgattgctttcgtttgcccaccacggatcgataacggtgttttatttcccgtttcccgtccgtcgatttgcgcgcccatttgccgaagtggcgccgtcacccgtgccatcgggcgtttgccaatcgaatcgtcaccgacaacgaccgaatgaaaaggccgaccagagaggacgcccaatagcaaacggattgttgtaccggaattgccgacatctagcacaccatttggctccttcagcccatctaaccctttgccttcaaccgtgactttgtcgccttcttgttcaatcgctacacccatttgcctaaaacaggcaatcgtgcttaaacaatcatcgccaggaagaaatccgctgacgtttgtagtaccattcgccatagcgccaaacatgacagcgcggtgtgaaatcgatttatcgccaggtacgacaattgtccctgacaaacccgattctgctttgtttagcagctttatcgtctcgtccatacttcttctccttatatcgtgtaagtttcatacatatgccgtttcagttcttcctgggcatatactcgatcgtcttctgaacggaaactaaggcgcaaaacgcccataatgtcttcccgcgtctctaatattcgaatattggtaatgctaatttctttattagcaagtatccttgtcacatcggagataacgcctggatggtcaggaacatcgacgaacaaatcataaaaagccggtatcgctcctttttcgcgctgtggcaactcttcacggaatgcttttgcttcttggaagtaagcatgaatggctttgccgtcgcagcgttcaaccatttcttttacggaatccatctcgatttgccattcggcaaataggcgcagcatttcttctttattatgcaaaagcacatcacgccacatgaccgggctcgccgaggcaatccgcgtaatatccctgaaaccgcctgccgctaattgggctacctctggatcggttttttcaagctttttgagctgatggactaggctagctgcaataatatgggggaaatggctcactgtgcctgccagtttgtcatgctgttgtggttccatttgcaaaaaacgcgctttcgtgcctttcaataaattttgcaaggcgataatatggcgtggctcactattcttgccaggtgctagcaagtaaaacgcattttcaaacaaatgggcttttgctgcctcgacgcccgatttatgtgaccctgccatcggatggccgccaataaagcagacgttgtcaccgaaatggttatcagcagccgcggcaatatcttgctttgttgaaccgacatccgtaacgatgacaccttgtttcaacgggatcgtgctaagctgctcaatcaattcaatcgttttgcttactggcactgctaaaatgataaaatcagctgcttgtgccccttcttctaggcttgaggcagcctcatcaattacgccaagtgctttagccatatggagctgttcggctgaaatatcgtagccaaccaaatggatgtcttggtcgcgcttaattgcaagcgagatggagccgccaatcaaccccatcccgacaacaaatgctgtacgcttcatgtcaatactattctcctactctttttatgcgcctaagcttgcacggagctggtccaaaatctcaggagctttttctataaaggcatcattttcggcctcattgcctatggaaattcggattgccgtcgggtaaccgagcgcttcacctgaacggagaataaagccattttcaagaaaagcttgaaagacaacatctcccggaatccctgtttccacaagcaagaagtttgtttccgacggaaacacaaacatccctctggcctcaaagaaagcgcgcaattttgccttctcgacactgtttttttgcttgcacgccgcaataaacgcttcgtcttccagcgctgcgagtgcggctgtgtgagcaaggatgttgttgttaaagggcaatcgcacaggttcaatttgacgagcgatttcacgctgactaatgccgtagccgacgcggaggcctgcaagtccatatgcttttgagaacgtccgcaacacaactagttgcggatatgcatttaacagcgcgacgctgtttgggaagtcatctaattctacatattcatagtaagcttcatcgacaacgaccaaacatgtagttggcacggcgtctaaaaacgttttcaactcggcttcaccgagtgcgaccccatttggattgttcggattgcagacccatacaattcgcgtttggtcgtcaatcgctgcaagcatcgcatctaaatcgtgagagccgtcttctttaacggttatttcttttatcgttgccccttcaatcgttgcatttaacttgtactgagaaaaagagggcgtcgccataaccgtgttggtctcaggcgttaaaaaacttctgcataatagttgaataacttcatcagtgccatttcctaatataagctgtccttcatctactttatgtttggcagcaagtgctttgcgcaaggctgtgccatagccatccggatacaaaaacgtttttgatgctccatcggcaatcgcctttgcgacagcaggagacgccccatacggattttcattcgatgccatttttatgacggtctctaaaccgtattccctttttacatcttcaatcggcttgcctggggcgtaaggcggcaacccttgtatttgtttttttgctaacatcgtgtctgcacctgctttccctagtcttactagctatcctacgcaaaattaagcgtactagcaactgtttaataggtcggagcgggatgaagaagagaattgacatattgctcaatttctttgactgcttcatctcgtgattccgcctgttttaacgcctcgcatctgaggccaatttgctcaacaatcgcactcccgatcacaacaccgtcagcatggcgccccatttcctcaacttgttcgtagctggaaatgccaaatccaactacaaacgggacaggcgatgattcttttaccagctttaaaaaagcttctacttgtggatgaagtgtttttctcgcgccagttacgcctagcgaggacacacagtataggaacccttgggcgcggctggcaatcgctttgatccgttgctgagatgttggcgccacaagtgatataagggcaagcccttgtttttcacactcattagccaatgtttcgctctcttcaaacggcaaatcgggaacgaggaggccgtcaattccgtagtcgcatgcggtctcacaaaaacgttcaaacccaaattgtagcaaagggttggcgtaagtaaagacaataacaggaattgtaagcccctcttttctcatttccgggacgagcgccatcgccttagccagtgtcattcctcctgctagtgcacgtttggaggcgttttgtatgaccggtccatctgccaacgggtcagaataaggaatgccaagctccagcacatccgccccacttctctgtaatgagagtgcgagggcgatggttgcttctcgcaccgggtctccggcggtaatgaacggaataaacaagttgcccttttttacagcatcacgaagccgcttattcatcgtacccctccttataaacccgttgcaatgtgtgcatatccttatcgcctctgcctgataaacatacgagtacagattggtttggcgtcatcgttttcgccatttgaaaagctttagccaacgcatgagccgattcaattgcgggaatgattccttcctctttggctagaagcgcaagtgcatcgagcgcctccttatcggttacagcttcataacgaactcgcttttgggcggccaagtaggcatgctcagggccaacgccagggtaatccagtccggcggaaatcgaataaggctccttaatttgcccagattcatcttgaagcaagtacgtaagcgagccgtggataattcctttcgaacctttgctgatcgtggcagcatgttcggctgtatcaagcccccgtcctgccgcttcgacgccgacaagctccacttcatcgtcgagaaacgggtaaaacataccgattgcgttgctgccaccgccaacacaagcaacaattgtatcaggcagtcgccctgtcttttctgccatctgctgtttggcttcatcgccgatcacgcgctggaaattgcggaccattttcggataaggatgcgggccgactacggagccgattagataaaacgtatcatctgcgtgggagacccaatagcgaatcgcttcattggtagcgtcttttagcgttcggctccccgtctccgccggcacaacctcggcgccaagtaattccatgcgaaatacatttaactcttgccgcttcatgtcttccacgcccataaacactttgcattccatgccaaggcggctagcaaccgttgccgtcgcgacgccgtgctggcctgcccctgtttcggcgacaagcttgtttttgcccattcgttttgcaaggagcccttggccaattgcattattcaatttatgggcccccgtatgaaccaaatcttcccgctttaaatagatattggctccgcctaattttgcgctaatgtttttcgcaaacgtcagcggtgtttccctgcctgcatattcagccaagtcggcttttagctctcctataaaagcgggatcaaccatcgcttttgccagcccagcttccaactcttcaattgccgacattaatgtttcgggaacatatttgccgccaaactcgccaaaacggccgcggctatctggtattgtttcttgcataatggacccccgcttcttgttcaaggcgcgctatttttgcgacgcttttttttccgttctcttcaattccgctcgatacatccagtccgtctacttggtagcgggcaagctcgacgacgttttcaggcgtaattccgcctgcaataagcacttgcgtaccttgccgaactccttcttccttataagaaggtatctgtttccagtcgaatgattcgcctgttccgccccagcctttggcacttttacaatcaattacatagccatcggcaatgcctgcaaaagcctgcatgatgccgagcgcgctgcttgaatgatggatcgctttccatacctgcttttgtgtgcggtccttgacggcctgcaaaaaagcaggcgtttcggtgccatgtaactggatcacatcaaataggtcgctgctggcaacttgtgcgattgtgtcaagtgattcattcacaaaaagtgctaccgtttgcttcgtgctcatgtcagttgtagccaaccattgcgccacgtccggaagggcaactttgcgcttgctgtttgccaatacgaagcccatgtaatcacaatgagaagctgctgccacttcgacatcctcttgctgatgcagtccacaatattttagtttcattggtttatcgcactttcagaaaacaagtcgatgatcgcttgccttttatcgtctttacgcatcaactgttcgccaatcaacacagcgttcgctccagctttcttcacacgcgcaatgtcatcaggtgtatggatgccactctcggacacaagcaacgcttctttcggcaccatttttgcaatctgctcggtttgggaaaccgacgtttggaacgtttttaaattgcgattattgatgcctatcacttctggggtaaaaacagcaagaagcgactctagctcttcttcgctatggacttcaactaaacactccaaccctttgctatacgctaattcatatagttcgtggagctgcttcgcttccattgcaccggctattaacaacatggcgtctgcgccaatgcacgctgtttcctctacttgaaggggcgacagaataaaatccttccgcaataccggcaaagacacggtctttttcacttcagccacataagcagtgtccccttgaaaatacgtacggtctgtcaaaacgctaattgcgcttgctccgccttcttcataaacccgtgcaatcgctgttggtgaaatcgtctcacataaaaccccttttgacggggaggcctgtttaatttctgcaattagccctagtggcaaagatgttttttgtaaggacgctttcaggcttttttttggaaaatactgcttttcaggcaactggagttggctgatttcctctcgttttgtcgccaaaattttctcaagcatgcttgattccccttccctgttgttgcaatgattgcaaatagcgaaacactcgtttgctctctatcgctttgctggcatagtgaacgccttcagcaatgtgactggcatttccacaggcgtacaacgctgctccagcatttaaagcaacaatgtttttcgctgcctgtggcccgtcgcctgaaaaaatcgcgcggattaacgcagcactttcagcgggcgtatctacttggatatcagcaagatttccaagcggcaagcctacgtcgtcaggtgagaaccgatacgtttcgcacctaccatctttcacttctactacgtgtgtgtcgccatgaatggcacattcatcaaggccatcagcgcctgtaactaaaaggctgtgctcgctaccaagctggcgcaatgcttctcccattttcaaagcggccgcttcatcgtaaacgccgagaagctggtaacgggcaccggctgggttcgtaagcgggcctagcaaattaaaaatggtacggaagccaatttctttccgtgggccagcgacgtggcgcattgactggtggtacagcggcgcaaataaaaagcacaagtttgttgtttcaagcatttggcaagcttcttcaacggaagcttgaatgttgatgccgagctcttccaacacatcagcactgccgcttttggaagagacagagcgattgccgtgtttggcgacagggacaccgagcgacgccaaaacgagcgctgacgcagtcgagatgttaaacgttccaagtccatctcctcctgtgccgcacgtatcaatcgtcccctcaatgacagcagggaatttgcgcgcataagcgcgcatccctttggcaaagccgagaatttcctccgcagtctcgccgcgaacgcgcatcatcgtaatgaggctcgccacttggctggcggttgcgcgccctgacatgatttgttccatcacttgctctgcttcttgtacagacaaggattcgcccattaaacatttgttcagcacgtgcttcatcatgacaaacgcaccgcctttgcaaacaatgcttctgtctgttcaatcgcatgaataagtgcctttgctttgtttaatgtttcttcgtattctttttccgggtctgaatctgcgacaatgcctgctcctgcttggatggtggcgcaattgccttccagaacaatcgtacgaatcgcaatgcaagaatcgatattgccgttgaaatccatatagcaaatggcgcctccgtagatgccccgtctagtcggttctagctcatttaaaatttgcatggcgcgaattttcggtgcaccagaaagagtcccagcaggaaatgccgcttttaacgcgtcataaggcgttgcttcaggcttcaatttgcctgttactttggagacgagatgcatcacatgggaaaatttcccgatttccaacaaggatggaacttctacgcttccataaactgaaaccttgccaacatcattgcgcgccaagtcaacaagcatatggtgctccgcccgttctttgtcgtcggctagcaactcacgggctaatgcttcgtcttcggccgccgtttgtccacgcttgcgcgtgcctgcaattggatgtatttcgacatggtcaccgcgtacttggacaagcttttctggcgaacttccaatgatttctttttttccaattttaatatagtacaaatacggcgaagggttaacatagcgcaacacacggtacaaatcgagcccgccaacagaaacggtcatttctagacgttgtgacaaaacagcttggaaaatgtcccctgcctgaatataagctttaatccggtttacatcgtttataaagccttgtttcgaatagttagagcgaacctcgatcggcagctgctttttcgtgaccatatgtggcaaaacaggcgctttcgcactttccaatttaccgattagtgtacgaattttcgcttgcgcttcagcaaaagcttgttctgctggctgcaagccacttttgactaattgaatcagcgtcaattgctttgtttgctcatgaaagcttaacaactgttcacaaaaaatgaaatgataatacgggcagctgcgttgatcgctccgcttgatgacaggctctatttcttcgaccgcgtcatagctgacgtagccaacggcgcctccttggaaaggaatctccatttcgctcggttgcgggtcgatgtgtgaaacggttttctgataacacgcttcgaaatttaccgcactggcaactacgttaccagtctgcaaatgaatggttttatatgaaccgttctcttctacacactcataaattgggctcaacccaataaaggagtaattggaccattccgactgcacgtcattgctctcgagcaaataggtcgcttcttcttgcaatgcttgaaacatttgaataggggtcaagccatcggcaaataccgtttcgctataaaaacatgtaccgtaacggttgtaggcttgctgaaaagatgcaaaaggggttttcttcatctcactcactccttgtgatgtgaaaatgaagagcgggggtggcgaaaaaaggggattcgcctctggtgaaggtatggaaaaaaacatataaaagcatgtttatgcaaccatgcttgccattcttgactcttctctactcttctccgctccgctcaactcattctcaactagtctcttattatactcaaactcaactatcttgctatttcctcttgcccagtagtgtaacgcaaatccccgtttcccgtcaacgccctaagcgcctatttttttaataaatcagggcgcaacacaattgccccttctaaaaaaacatgcttgatctcctcttgctttaaagatgtattcactgtcatcattacacggatacaaaggggcaagcttccttttaccggaatttcttgagcacacattacaggaacgtattgccatccttgtaaatgccggaccgccttcgccggaaatgtagcatcaatatcgtttgtagccgtcacaatcacttgggcgatttgctcgggctgcaacgcattttgactgaccatttcccgcacgagtgtttctgtagcctgttcaatttcttgcgcctcattttttgttacggttgttgcacctcggacgccacgaatcatgatcttcctcccagttcttcttctaacaactctaaaagcaaatgttcatcgactgtttttgtataggcggctccaagctgagcgagcaacaccatgacaatctttcctgcattcgtttttttgtcgcttttcatacgggcaagcaaccgttgtgctgaaagccctgctggcaaacgaaggtcataaccgagggcagaaaaccactcttcataatcggcaagccgcaaatcctcttttgtaaaacggaggctaagacgaaaagcaaaacgcatgccgattgccaccgcctcgccatgggttatctttccataacctagttctgcttcaatcgcatgagcgagtgtatgaccaaagttcaaatgggcgcggatgccatgctctttttcatctttgccaacaatgtcggctttgatggcaatcgccttggccaccattttttgcaaattatctgcttttatacttgttagtgcaggcactgtttcacgcagccaagctaaaaaagaagcgtcggctataaaaccaagtttaacgatttctgcaaaaccagaacgccattcgtgttccggcaaagttgccaacaattctgtgtcaaacaagacagcttcaggctgatgaaaaacgccaatcatatttttagcggcaggcaaattgactgctacttttccgccaacgcttgaatcatgggcaagcaaagtagttggaacttgaataaagcgaacgccacgcatataggtccccgctacaaacccggccaaatcgccaacaacgccgcctccaaaagcgatgataaccgactggcggtcaagctgtttttccaaacaaaaagcggcaagctgctcatacacatgaaaagactttgattgttcccccgctttcacgacaaacgtatgaggctcctttgaaaaagaagaaaccaacacatcaagataacggtttgcgacattttcatctgaaacgatcaaataggaagaagccggggcaagcgcttcaatcgttttgcctgcctcccgcaaaattcctgaccccacttcagccttgtattgttttgaagaggtgtgaatgtctacaaacatcgtttaaaactcctttgaagcggcatggtgacgttcgacagctgcctggatcagaggaagctggtcagaaccaaatgtatcaagcaaggcattggcaacttcccacgctaccacattttcgcagacaaccgatgcagcgggaacggcacagctatcggaacgttcaacacctgcggcaaatggttctttcgaatcaatatctacgctttgcagcggcttatacaacgttgggattggcttcatcacaccttttacgacaatcggcataccgttggtcatcccgccttcaaaaccgccaaggcgattcgtcttccgcttatagccttcctcttcgctccaagtaatctcatcatgaacttggctgcctggaagccgcgctgcctcaaagccaatgccaatctctacacctttaaacgcgttgatgctcatgaccgcgccagcgattttgccatccaatttgcggtcataatggacatggctgccgaggccaataggcacgccagcaacaacgacttcaactatgccgccaatcgaatcgccatcttgttttgccttgtcaatggctgccatcatctttttgcttgcatcctcgtctaaacagcgtacaggtgactcttctgagcgcttttgcaattcttggattgaggcatagtttgtttcctcagcccgaatgccgccaatttcgcggacatgtccggcaacttcaatgccacaagctttaaggatgacctttgccaatgctccacaggcaacacggacagtcgtttcccgcgctgatgaacgctctaaaacattgcgcatatcgcggtgcccgtacttgattgcaccatttaaatcagcatgacctggacggggacgtgttaacttccgtctcattttttccgcttcttcctcacttatcggttcagcgcccattatttttgtccaatttttccagtctttattttcgacaacaaatgtgataggggcaccagtcgtcatgccatggcgtacgccgcttactatttgaacgcggtctttttcaatttgcatacggcgaccacggccgtaaccgccttggcgccttgccaattcacggtcaatatcttctgccaaaagcggcaattgcgctggcacgccttcaataatcgcagtcagttgtggtccatgtgactctcctgctgttaaaaatctcaatgttaacaccctttcctatcttgccggcaatactttatcgcttttatgcgttaaattatagcatgtattggagcaattgtctgtacattcatgttactttttcataaaaaaacggctttattgcttgtagaccatattgttggggatcaaaaatttgttccgtactgccgacaaatagaactccgccacgaaccaaagactcactaaattttttgaaaatcgtttgctttgcctcctctgtaaagtaaataagcacattgcggcaaataatcaaatcgcagcgtgtcgggtactcgtcagcaagtaagttaaggcgcttaaaattcacaagctttttcacatcttctatgatggcaaaatcgtccccttgcttacgaaaataagcatgttggaactggctattcatttctttaaatgcatcctggcggaaacggcctaaccgtgccttttctagtatggccgagtcgatatcggtcgcaagaatcgttttattttgtaaaggaatatctgcttctttgatgagcatcgccaatgaatatggttcttctccagtcgaacaggcgctgctccagatgttcaatccactttttttcgtcgctagtcgtggcaaaatctctgtacgtaatgtctcccaacgagtacgattgcggaaaaacgaagacacattgattgtgacacgatctacgcattctgtaagcagcaaaggatcattagccatcgcgtccgcatagcttgaaaagcttgaaaaatgccgtttatcgcgaagtgcagtgagcctccgtttcatctgcgtctctttatatgcttgcaaatgaatgccactcagtttgaaaaaaacagaaacgaattgttcataatcttcatctattctcatcatgttgccgtttttctggcagatacgtctgccaaaaaacgttcttcctttccatgtaatactttactcttaaaatgagtgtaccatgtttaacggtagctcgacacagtcaagcagacttctttttaaaacgcgttcgttttacataaaaaagccagttgagcagaacccaactggctttgttttaaacccatttattgctgtctttttgataatcgtttagctcttcttctttaaaaaaaatagcgatttcacgctcagctgattctggggaatcagatccgtgtacgacattcatgccaacgttgactgctaagtcgccgcgtatcgtccctggagcagcctcgctaggattggtggcgccaatgagttgtctagctgctttaataactccttctccttcccaaaccatcgcaaacacaggtccggaagtaataaagctaacaagctcgccaaaaaacgggcgttcccgatgttcgctataatgcgtttccgccgtttctttgcttaaagtgaccagcttagctgcagcaagcgtgtaccctttttgttcaaaccgcgatacaatgtttccaatcaaattacgttgtacgccatcaggcttaaccattacgtatgtacgttccattgtctaacctcgctttatgaatgtttacaccgaacgtttcaagtatagcaaattaggaaaacgctaacaataagatttcttagaatagaggggcttttttacaaacaaaaaagccagcttgccgctggcttagtattttctccgtcctatgtaactggccacttcaattaaatgccttttggcatcaatgtcgggaaatcccattaaaagcgtgtttgccttgtgcaaatagcgatcactcattgcctgtgcatattcaatcccgcctgatgtgcggacttcatttaatagcggctccatgtccatttctaaagaagactctttcgttaatgacttctctagccgttgtttaaatccaggcgtgtgctcaatcgcatacagcgcaggcaacgtgacattgccttggcgtaaatcgcccccggctggcttgcctagctgttcattggtgcctacaaaatcgagtatgtcgtccataatttgataagacatcccaagaaaataagcaaagtaataaaggtttttttggagttcatctgtcgcgcctgaaacgatggcacccagctggcagctaacggcaatcaacaatgccgttttacgtttaatcctcctcaagtaaatgcgtaaaccttgatcccaattgtactggtctcggatttgttcaatttcgcctcggcatatttggttcatgacgtcggaaataatcgtatggactcgtttatcgctgaaggcttttgtcgtttcaatcgcgtgcccgaaaatgtagtcgccagtatacatcgctacacggttatcccaacgagacatcactgtttcccgcccacgccttagcggcgcattatcaatgacatcatcatggacaagggaacccatatgaatgagttcaagcgtaacggcaatgtgctttaatctgtctaattgataatcgccaaacttcccggccaaaagcacgagcacaggacggattcgtttcccaccggcttttaacaaccccgttgatgcttcttttaaaacagggtgtttagccgaaagggttcgttccaattccgcttcaataaattctatatctccttgaaatgctttataaatatctgctaacttcatcaacgccaccctcgtgcagaaactgttactgcttatattttataacagacgtggtcggcctccacttactcaatgtaggcacttcccgttcaagaaagccttcttcataacaaagctgaaaataatacagcaaaccttgctccgttttgcttgttggctgatgaagcagtgcctcaaagtacatgtcccagaaagaaaggcttgccattcctttacgctctaaataacggcttatctgcctatacccatccgctgctgttcgcaaataactttttcttaaggattggtgtagcatgttaatttcttccgctttgctttcgagcgcatctttcctaactgcaaataacgcgtacgtcatcggtaagcctgtccattcataccacagctggccaaggtcatacacataaggggcatcagcgtggcgctctcgaatggcgtcatcgcctattaaaagggctgctgtatgggatgtaagcatgtttgccaaatcaggcttttcttgtttatagcaaggtgttacctgataaaaacgctttaatacgattttcagcaaatgaaccgttgtctctgagcttgttgtcaaagccaccgactcgccctcaagcttattaatcggcacttttgaaaacaagagcagagagtgaaccatgccagccgaagcaacacaaagatccggtaacaccacatagtctttttcatttttgccgtaggaaaaagacgatatggcggcagcttgaagttcgccagaggctagcatatggttgatattcgctggtacattttgcgttatgcatatgccgtgttgctctaatgagctacggtccagctcgaagaaaaacggcaatgtgttggtatatgcaatttctccaacatgtaagctcataggaacctcctttaataaaaccggatgacaagcatatcggcaaaagcaaataaaaacatgacgacactaagcgtcccattcatcggaaaaaacgccaattgcactttcgataaatctttctcagaaacaattaaatgctggtaaaccataatcattcctgaaagggcgacgcccaccaagtaaatccatgtcaaaggcgttaaaaagtagagaccaacaaaaaacgcaaaactgacgacatgaaaacaacgggcgatccataacgcttttttgatgccaaaacggcttggaatcgaatggagcccgtgtgtttgatcgtattcagcatcctgtgttgcatacacggtgtcaaaaccagcaagccaaaacatgacagccaaaaacaaacaaaagctagccaatggcaactggccagttacagcaacccatccgcctaaaggcgcaatcccgatcgttatccctaaaattaagtggcatgcccacgtaaaacgtttggtataggaataaaacacaagaaagaatacagcaattggcaacaaatagacggaaagaatattcaactgcgaagcagccaaaaacaatagtgcaaaagaagcgacaataaaaatccagacatccgccttcgataacagccctgctggtatctccctgttagccgttctagggttttcacggtcaaacttagcgtctatgacgcggttaagcgacatcgcggcactccttgctccgaccatcgccaatgtcacccaaagccactgaagcaacgaaggaaactggccgtaggcaattaaactgccaagcaacattgctaggaatgcaaacggcaatgcaaaaattgtatgttcaaatttaatcattcgcaaaaagattttcgttttatttaaagatgcagtagccattactgccttactcctctccaatatcacacatttctatatcggttttatccccatatgcatagcgcaaacaccgcctgtgtagctctttactgtaacatccttcattccagcttcaacgaacatgtcccgaagtttgtcttttcctggaaacgctaatgttgattcttggagccacgaatattcttcgtatttttttgcaaacacttttcctgcaaggggcataatccgcttaaaataaaaaaagtatagttgtttaaagactggtatggttggctgcgacgtttcgagacaaacaattttgcctccaggcttcgctactcggcacatctcctgtaacacttgcatgtaatcaggaacattccgcaacccaaaaccgatcgtcacataatcaaacgtgttgtcatcatacggaagcgccattgcgtttccgtggacgagtgagatattagtgcgcttagcagctgcaactttttcacgtccgaccgcgagcatattttcgctaaaatcaaggccaatcacggacccctgctcgccaacggcttccgacagcgccaacgtccaatcgcctgtgccacaacatacatcgagagcactcgttcctgcttggacatccatttgcttcattgtatctttacgccagcttttatgttgctgtaaactgataacagaattcatcacatcgtattttttataaatcgattgaaatacgtcatgaacgcgttgttctttcgattgggccactcctgctacctccttgctttttcaaggaatgtttttataaacgcacttgctttattattctgcttgtccactgcttcttgtagctgttctaattgcctctgctgttcaactttaaaaagagaaccttgtttattctcagccatccaagcttcaatgagcggcgataagcaacccgcctcagcattttctttttctttttctaagcgtttatacagaaaaaacggcctaagcaacggctcgtatccttcctgaccaatttcgttggctatcgccactgctagtagtgcttcaatctcttccgtttgagcgagacgcatttcaaacgagttgtctttgtctaggtggcttgcgattttcttttcatatacttcttgaagggtgctgccaaacagttcaatcatatcaaccgcatggactcgagccaaagcttggtagtagagggcgctataaaaatcgccagccaacacatttagttggcgcttctttttggcaaactcttcatttgtgttatgtaaggacacaagatcgtggatcaatagtccggcatgggcaaagccccatgcaagcgtgatcgccccggcacgatctggcggttccgattcagtcaaaatcgtataaaccagccaaagttcatcggcgtcggggcgggggttgtcaatgtatccttgcaaataatcgtattgcaatatccgttcaaagcgctgttttatttcaagcgccgatcgcatctccggcaacgttgtattgctcattgttcatgtcccctctatcgcgtgcaacccgctaatgttctttatatagtatagcatacgcccttatccaatgaacacaaagaaaaaagcgctcgcatttaagcgcctgattcctccgtatccaatgtaccatggcttgtttggataatcgctttgccgcggactttgacagctgacgtatgttctgtaaattggccaatcatgacttcgcctttgtcgagtttttccgaatggtggaagcgggtatccgaaccgcgggtaaggccaataacctgaacaccattttcttttgcttttataacaaaaaaatcattctcatgccccatcgttatacctccttcgtttggattagttgcaatacttccgcacgcgcttccccgtcattggcgaatgagccgcgcaccgctgttgtcaccgttttcgaacctggctttttaatgcctctcattgccatgcacatatgttctgctgacaaaacgaccattgccccttttgcatctaaagtagacatgagcacatccgctaatgtttttgtcattctttcttgtacttgcggccttcttgctatgccatcgacagtgcgcgccagcttcgacaaccctgtcacgatgccatttttgggaatgtaagcaatatgagctttcccaaaaaacggtacaaggtgatgctcgcacatcgaaaagaacgggatgtctttaacaaggacaagttcttcatgctcttcgccaaacaccgtttttaaatgctcgctaggatcttcgtggagaccgctgaacatttcttcatacatttgcgctacccttctaggggtatcagcaagcccctcccgttcagggtcttcgccaattgcttctaatatcatacgcactgcttgctgcaatttatcgtggtcaaccattcttgtccctccaccaaaactctttataaaggataaatctcttctaaagagtagcaaaagaacagtggaaaagcaaaaagaactcatcgcatttggcaatgagttagtcgaaagcactctccgtttaacagtcaaacataacagatgctaaaacagcaaatacctaaagggccgcctatgcccggttacaaaataatggcaatcaatccgccagagccttcgttaataatacgttctaatgtttcttgcagtttgtagcgggcattctcaggcatcaacgacaatttagcggaaatcccttcacggacgatcgaatttagggaccggccgaaaatatcggagttccaaatcgaaagcgggttttcttcaaaatcttgcattaaatagcgaacgagttcttcgctttgtttttcggtgccaatgattggcgcaaattccgattcgacatcgactttaatcatatggatggatggcgctactgcttttaaacggacaccaaatcttgagccatggcgaataatttctggttcatccaaactcatgtcattcaaagacggcgcggcaatgccataccctgtttgtttcaccatgcgaagagcgtctgcaacttggtcatactcggacttggcatgggcaaagtcttgcatcaacgatagcaaatggtcctttcctcgtatctcaaccccaactacttctttcaacacttgatcgtacaaggcatcaggagcatataaatcaatttcggcaattccttggcccatttcaattccggccaatttcgctttttcaataaactctaattccgtaaattggctgacaacccgatcaacgtcacgaagacgtttaatatctttgacagtttctcgtacagattcttcatagctttgccgcagccaatgctcattatttagaaccatgacccagcttggcaaattgacattgacttcgtgaacgggaaattcaaaaagaacttcacgaagcacactatttatatcatggtcggtcatgctttcaatgctcatcgccagcactggaatatcgtattcttctgcaagtgatgtacgcagctcttccgtctctggatggcttgggcgtacactgttcacaatcatgataaatggcttcccgacttccttaagttcctcaacaactcgcccttctgattcgagatagtcttgtcgtggaatatcgcctatcgttccatcggttgtgatcacaacacccaaagtcgaatgctcttgaatgactttgcgcgtccctatttcggccgcttcttgaaacggaatcggctcttcataccatggggtgtggatcatccgtggtccattttcatcttcgtagccttttgcgcctggaacagcataaccgacgcaatcaacgaggcgaatattgacgtcgagcccttcatccacatgaatcgaaacagcttgattcggaacaaatttcggctctgttgtcatgattgtttttcctgctgccgattgcggaagctcatcttgggcacgcgctttgtcagcctcattttcaatattcggcagcacgactagctccatgaatttcttaataaatgtcgattttccagtgcgaaccgcccctacaacaccgagataaatgtcgcctccggtccgctctgcgatatctttaaagatatctactttttccaacaaaagaatcccctcccggtcaagtaaagtttgatgcagccgagtctttcatatctaaccactatcatttctatgacattgtccacttattatgactgactaggaaaaattaaattgtgcctgcatccaatgcttgagaaggggagcctcccgcaacatgccccttccaatgtaactatatggatggaaggggcagattagacctgttttatcaattcgaatgggaaggactttgcaatcggggagttaatcgtagaaacgtgtgtcgtattgaatgttgccttcctcatcaagggagtacggcactgaatacaatggcaaaaaaggagagtcttcatataaataacggcggaggtcgacaccttcctcaaaatccttttcctgctctgccatctttaaatcgagtaaataatcgattaccacttcgccctcgtttgtaaataacaacggcagcgatgtttggttataaggacttgctacatacggctcttctgaataaccaagtgctttataatcgagcgtaaacaaattgtagtctagcgcctctccaattggcgcatatgtatgttctcgcatataatcgtaaatccgttgctgaaggtcacgaacgacattcatcgccgtaacatccaagacttttacttctgggtcctcttctacatttatgagtgtatattggtgtgtaccgccattttcaaaggctgttcccggaggctgttgcatataccggggaaccaactgcctaaaatcaaccgtatagcgctggtactcgtgtgtattctcatcaaaattagtaattgggaggactccggtatcctcacgaaattggtcaaccgctgtttgcacagccgctagttggtctgggtaagcaatttgattttctgctctctgctcctgtggcaaaaaacaagcactaaggaaaagaacggcacaaattgcgatacaggaagcaagaagctgcttcattgattcattcctccttgcaaaatggctacctgcccgttgatgtcggaccgccaagaacgatataggcgacaatgatccctgaaacgagcagacaacaaaaagaaaacgttaacacaacttttgaaaagaagccgcttagttttgttcgcgctaaaagcgcggtacctgcagaaatgaacatgagcagcagaccgccaaaagatatgtacatatttaacatcgcttgcgacaatgcgagacacccctcttttcaatttggtacataggcaagtataccataagggaagacaagcagatagatataaaaaaagctagacaggagtggggctctcctctctagcttgactaaatcctaattcttagccctctcttttaatagtaggtgttctattaaagtatatgcaggctccaggttttggtctagatgtttgactaatttgtcttattttttgttgttaaacattttagccaatgaagccatatcagttggcatattgttgtttaaaatcgcttcaacgatttgatcctcttgttgtttagagactggcctgtttgcaagggcagccacttttccaatcaattggcgcaccgttgcctcatctttcaaattggcttgactaacagagtttgccagctttaatagctcatcagggcgcacttttgtagttttatgcacttgatcaaaaaatgagtcatttttcttaaacacctaaatccctcctcatgcttacggttctccttatcgtatgcatgagaaaaaaagagtgtgcgcaatttagacgcaatcaaaacgaactaaccaccacgtttacgaacggtaaagcgactccacttcatgtcgttttacacgtcccattaattcttcagccgcttggtaagggtcgattccgttaaacaggacactatagagcgctttggtcactggcatatcaatctccagcttttcggatagttcataggctgcctgggttgttcgaattccttcgactaccattcccattttttcaagcacttcatccatggacaaaccttcgccaatcattcgtccagcacgccagttacgtgaatgcacacttgtgcaagtaacgattaaatcgccgagccctgacaaaccggaaaacgttaatggtttggcgcccattgtcgtgcctaagcgagagatttccgctaaccctctcgtcatgatcgctgcttttgtattgtccccgtaaccaaggccatttgtcacaccacaggctagtgcaataatgttttttagtgcccctccgatttcaacgccgaccaagtcagggttggtatagacacgaaactgttggttcataaacaaattttgcgtatacttggctgcctcatcatccgctgaagcaactgtaacggttgtcggttggcgcaatgcgacttcttcggcatggctgggaccagataaaacggtgatagaagaaatgcgatttgtgcttgcatcttcttcagcgatcatttcagatatccgcttatgagtcgcaggttcaatccctttgcttgcgtgaataaccggtaccgccttttgcaaagagggcacgattttacggacagtttcacgcatcgctttagtcggaacgactagtacgatagcttcaactccaccaagcgcttcctccatccctgtataaccgcgaatcgttgttggcaattcgatgttcggcaaatatgatacatttgtatgacgttcgttcaattcgtccatttgttcttgtcggcgcccgacgaggcgaacatcatggccattatccgcgagaaccatcgctaaagcgcttccccagcttcccgctccaatcaccgcaattttttgcattatgaactcctcctatgcatgttttttccctaatttgttttccgtgcctgcaataagccgccccatgttcgtgcggtgccgccataaagataagatggccaataatacagctaaataaatatactctagtgggtaatgaaaaaacggcagcatgatgagcgcagcaattggcgttaacactgcaaataaaagcgaaccaagggatacatattttgtgaaaacaatgcttaaaatcgctacaattccggcacaaagggcaggaagaaataaaagcgtggccacaacgccaatcgaagtagcaactccttttccgccgcgaaagccaaaataaataggccaattatgtccgagaatcgccgctaagccagccaaagccggcacaagagggtagtccccattcgtgagggcaatggcaagaagcgcaggggccacccctttcgcgacatcaagtaaaaggacacaaatggcaggtccgattccaagcacacgcaatgtatttgtcgctccagcattgccgcttccttcactgcgtatatcgattttcttgattttcttcgcaatgatatagctaaagctgacagacccaagcaaataaccgaacaacaccgtcgcaattaatgaaacgatcattcagtttcccccttgccaattattaatcattcttttttcgtgcaatgatgtgaataggcgttccttcaaactcaaaagtagcacgcaatcggttttctaaaaagcgcctataagagaaatgcatcagttcgggttcgtttacaaagaacacgaatgtcggcggctgtacggccacttgcgtcacataattgattttcaggcgcttgcctttatccgttggggttggattcatggctaccgcatccataatcatatcattgaggacatgagtcggcacacgaagatgatggctttctgacactttcctcacttcaggcagcaacaaatgaaggcgctgcttcgtcttggcggacaaaaaacaaatcggcgcatacgaaagaaactgaaactcggaacggatgtcttcgacaaatgtctgcatcgttttgtcatctttttttacggcgtcccatttgttgacgacgatgacgattgcccttcccgcttcatgggcataaccggctatttttttatcttgttcaataatcccctcttcaccatctaagacgacaagaacgacatcagaccgctcaatcgcctttagtgaacggagcacactatatttttcagtggcttcataaactttgccacgcttccgcataccggcagtatcaattacaacataatgttggccatctcgcgtaaaggatgtatcaatcgcatcacgggtcgtccctggaatttggctgacgatcactcgctcttcaccaagaagcgcattaacaagcgaagacttgccgacgttcggacggccgatcagtgccatttttatcgtatcatctgcataatcatcgtcgttttcttcaggaaaatggcgaaccacttcatcaagcaagtcgccaatccctaatccgtgggagcctgaaatgccgtaaggctcacccgcccctaatgaatagaactcgtaaagcaattccctcatttctgggttgtcaactttattaacagcaagcacaaccggctttttcgaccggaaaagcatgtttgccacttcttggtctgcggcagtgattccctctcgtccattgaccataaaaataatcacattcgcttcgtcaatagcaatttccgcctgttggcgcatttgcacgagcaacggttcatcgccgagttcaattccgcctgtgtcgattacataaaattcgtggttaagccattcgcctttgctatataaacggtcacgtgttacccccggtaagtcttcaacaatggcgacacgctcgccgacaatccggttaaatatagttgacttccctacattcggccggccaacgattgcaacaactggtttagtcacaatcacacaccctttctccttcaaactacttaaaaaacagcgttcgttttcttctccagcttaaccattttactatcttcatgcatgcttgtctatccttgttggcactggcttcggctgtctattattcgcaagcacatgttggcgccatttctccatggcaaccgaaaagaccaaagcggctgtactcatggagacgctaatggcaaaaacgtcaaaaaacgcaagcgagccaagctccattcctccgttaagtccgtggcgatacacgttcaaaaacaagtcgccgtaaaggaggccagtcgctaatgcagcagtacggtttgctctcctttttataataaaaatggttaaaagcacagcacctgcagacagaaaacgaccgtcaatgagtaaaataaccggatcgagacgaatcaattcttgtatgcctatgtaggtggccgccacgagtatacagcaaacagctggatacatgatgccaatgaatttaagctttcctagctgtaaataacagatcaatagactaaaaacatagccaatgctaatttgattgcctgaaatgatcacgttcaaaggaatgaagcataatagcgctaaaatgcttgcacacatcacttgccgcagttcatttttcggcaacaaaaacgttccggcaatccaagcgagccaaccaaaccagtaaacaaatacaccgtccatttctcatcacctcattggacagtatcggcgctttcaccaacatttagacataaaaaaaccggcgcagctcagcttgcgccggatcatgtgttattggtcacggtatttttttaactgatcgccgatcatatctccaagcgagaagcctgatggctcgtcgttggctggcttttcataagcacatgtttcttttcgttcttgctcttcagacgcttcgcgaatgctaagagatacgcgtctatctgcttcgctaacctcgagcacttttgcttgcacttgttgcccttcttccaacacttcttgcggagtgccgatatggcgtttggaaatttgcgagatatggacgagcccttctacccctggggcaatttccacaaaagcaccgaacgatacgaggcgcttcactgtaccagtaacgatatcaccagctgaaaatttgctttcgatgttttcccatgggccagctagcatctctttgatggagagggaaacgcgttcgctatcaggatcaacggaaagcactttaaccttcacttcttgcccttctgacagcacatccgacggatgctcaacacgctcatgggcaatttgtgaaatatgaacgagcccatccacaccaccgacatcgacgaaagcgccaaagctggtcaagcgttgaacttttccttcaacgacatcgccagttgaaagggagtgcaacacttgctttttcttttcttcaatttcggcatcgagaacagcccgttgtgatagaatcaacttattgttgtctttgtcaatttctgttacttttaaacgcaatggcttgcctttgtaatcagaaaaatcttcaacataatggcgctctaccaatgaagcaggaataaaccctcttacgccaacatcgacgacaaggccacctttcacaacttcggctacttctgcttcaataacctcgcctttttcatacgcttcctcaagctgttcccacgccttttcggcttgaaccgcttttttcgacaaaatcaattcatcatcttcgacttttgtgactttcagttctaattcatcgtcaacagagaggacatcgcttgccttttctacatgcaggctcgacaattcacttatgggcacgatgccgtctactttaaagccgacatccacaaatgcctgcttgtcttcaacttttgttactttccctgtaacaatatcccctacagaaaaagatttgatttcatccatgccgtcattcatttcttcgaccattgacttttgcctccttcaatccggcaacgccgggcatcttgcgtttttttataaacagcctccaatgtttctgagaacgaatgaaggacgttttatgatagatcttgatagtgatccttcagcttttgaatttcatccatgatgatttcagtgacttcctttgctgaagtgcggttcgcccggtgctcttccatcgagattggctttccataaacgagggtaacacggcccctcattttgtaagggccaataatggcacacgggacaacatgggcggtgctttttaaagcaaaaaaaccagcgcccgtcagccccttcccgatctcaccagttttagagcgcgttccttctggaaagatgcctaccatgtccccagattttaaaatatctaaagaagtgcggagcgattgtttatcgccaccggcgcgattgactggaaaagcgcctagctttctcagcagcgttttcaaaacaggtactttaaacagctcttttttagccatgtaacgtactggccgtttgatataggcacctagcaaaggcggatcattgttgcttatatggtttgcacaaagcaacaccgcaccttcgtctgggatgttttctttcccgtaaatacgaactttgaacagcgcatttaagtaaaggcggcaaacggcttgtccaaattggtaaagtgtcattggcgcgaatgctcctttactaaatcaagaatcgtctcaacgacttcatcaattcccatgctggtcgtatcgacgacttgtgcgtcggctgcctgcttaaggggagcgatcgctcgtgttgaatcaagttcatcacgcttagcaatatctttttttagttgttcgaagtccgacgggagccctttttccaattgctcaagatggcggcgtcgagcccgttcttcgactgaagcagtcaaaaacacttttacattggcatctggaagcacgtgagttccaatatcgcgcccgtctagtacggcgtttttcgatttggcaagctcctgctgcatcgccgtcataccttcccgtacttctcggtggctcgctacgagcgacacattgctgttcacttcgtttgtgcgaatcgctgcggtaatgtcagcgccgttccaaaaaacagctgtcccttcattggatgattccaaacgcagctcgcttttttctagaagtttgccgagcgctttcccgtcgtgcaaatcaatgccctcagctaacgccgcgaatgtgatcgcccgatacatggccccagtatcaatatatagaaaacctaatttttcagctgtttttttggccactgtgctttttccggcgccagcaggtccatcaattgccacattaaatccttttgccataagttcacaacactttcctgcattctctttcttacgatacgacaaagcagcagacttttcaatcctaacgttcacttcccgtatctttctttttattatctcataatttgcataaatggcaagcacgagacgaaaaaaagactctctttccagagagccttctgaatcaatattctggttctgaatccttcattcgttcgactttttcttcttcgcctgtcaacgcattaatgaaaattcggtatgtgtcgttatcccttgttccgtaaaattcataaacaaacacttcttcattaatgtcattttcaatgacggcaaggtggtcttcttggatttcgacatgtttattgactttggcttgcgcctcttcttttgtcaattttggttctgggatttgcctgtcttcttgatggtggatcagatggccacggccgacataagatataacgtccccgtcatctaaagctacttcaatcatgacgttatccgggtatatgcggactccgtcttggacataggcaaattcgagaacgccgacgttgtcgtattgcgtgctttcaacaagttgcatgccttctttgccgccacgctcaagaaagttttgcgctttattgaccgcttcattcaaactgattttcgctttatcaatttgccggtcttgcaaaaaccaaatcggttcgccgccttcaacgctcatatccatatcatagttggcttggttatcagggtcatcaatcgaaagagaataagctggatattctagcgcctttggcgaatcgttgatttgcacgctcgtgccttcgcctaattttaaataatcaagcgctcgttgctttgcttcctcttttgaaatcttttcttttcctgccaacgcctcttttagctcaccatttaagttgcgaatcgctgaatcagtagcgccccattctacttcactaaacccttgcaccgatttatttagtctttcaaaatggccagcaaccgatgatgattgggttggctcgtcttctcgctgttcatcattttgagcgagccattgcatacctccttgcataacagttgcctgtgtttttctcattgattccctaatggaacttgcttgctcatacaattgggtcaatgtctcatattctttgtccgtcagcggctccttgtttaagtcacggacagacgtacggtaggtaaaatcgccgattttaaacaaatatttttccgtgtcgtccatgtttaactcttgaacaggcagttcagccaaactcttctcggcaaggctcgtcactcgccaaacatcagccagtgaaggcgtcaattgcctttgtgtgttcatcgcaagtgtcttgccaagttcgtcttcaatttggtcaatatggtaagtcaaatcatgaaatgctcgctggtacgtattgttcgctgtaatttgcagctggtttttttcttgcttttgctggtagccccaaacgcctgtgccaactactgcaacggctaaagcagcgattaaaagattgcgaaacatgcaaatagcacctccgttttaatagcagaatatatgtttgccaatccgtttaatttgtggccgcgaccaaatccaatctgatgtcgctgtatctggattgaaataataaagcgcattgttggtcgggtcttgcccatttaacgcatcaagcacagcttgccttgacgtttcatctgcgcctaagttgatttgcccatcagctaccgccgtaaaagcgcggtcttcatatatgacgccagcgactgtatctgggaaagttgctgaatttaaacggttgacaatcactgctgccaccgcgacttgtccttcataaggctcaccacgggcctcgccatacactgcctgagccatcagttgaatatcattcgatgaataacctgaaggcacattgtttgctttttcaataatcggttcttgttcatttccagtttcaggctgattcggagctggctgctgtgcctcgccaccttttgctgcttcctttttttgtttttgcttatctgcagaaccttttggccctttctggatgtcttttggtgtgccgccatagtgagaaaactttctgccctcgttcagtgcttttgtcacaaaggctttatcgtagtcggttgtgcttgccagctttgctttcatgtcgtctccgaccaatccatcaatttcaagcccatattcgtactgataatgccgcacagcccagtacgtcccccaaccgaaaacaccatcaattttgccattataataccctacatactgcaaacgagattgcaattcgacgacatcgtcgcctgttgcccctttttgaatgacttggtcactaaaggcatcaaccatttcgttgttaaaaaaaagaaccgcaaacgctaaagttgcaccgagaaggcaccgagcgattcgctttgttcgaaacatattttcgttcctccttatgcccacttttttgtggggaaattggtcgttactgctagtctttgttttgctggggtgtttttatgcaaaaaaaacagacgcaaatccgctttcgctcatttgcgtctgttttcttataagcttcctacattaaaataacgggcttcaggatgagaaaatacaagcgctgtgacagatgcttctggttccatcatgtacccatcggtcaattcgataccaattttttctggacgaagcaattgaaacaacttggcttggtcctctaaatttggacaggcaggatagccaaacgatacgcggatgccttggtacttcgctgcaaaacgttcgttcattgtaaaatcagcgccatctggaaacccccaccgatcacgcatttgctcgtggacgcgttccgccaaaccctcagctgtttctaatgcagccgcttgaattaaatggctatacaaataatcgccttttgcttttgccgcttctgctgcctcacgcacaccagctccagcagtaaccgctaaaaacccaacataatcaaccccttcgccaacagggcggacataatctgccaagcataagaacggagcttgcgtttgccgtggaaacgcaaagcgttcaagttcacggccaacatcataaggatcaaaaatcacgagctcatcgccatcggcattagcaggatagaaacggtatatcgcatttgcctgtaacgttttcttcgttttcgcctcttggaagaacgcatcaacttgggcttttagactcgtggtgcgttggtctttctcagcaagcaggcggctcactttcccttggataccaagatgacggccaagaagcatttgcatattcacatatgggtaaatatggtcgattttataatcacggattatatgctcatcaaggtcggttggtttaaagacagcatgatgatgggcgatatccgacttttccctcttagcaagcgtcggcgctttcgtttttcgctgatcattaaactccgctttttgttgtcttgccgtagctagttcaagggcaagttcatttcgcccttctggagtagtaaggcgattggcaagctctaaaccgttcattgcatcttttgcataaacgactaatccttcgtattcaggagcaatccgtgtatccgtaaattttttcgttaaagcagccccaccaacgagaatcgggatgtccacatgttgttgccgtaagtcttgcgctgttaacaccatttgctgggcggatttaacaagcagccctgacaacccaatggctgttggctgttcttttttaatcgcatctaacaattcattcgaggtaactttaataccaagattgacgatagaaaaaccgttattgctcaaaataatgtcgacaaggtttttgccgatgtcatgaacatctcccttaaccgtagcgagcaagatcttgccttttccttgttcttgttcgcttttttccatatgtggttcaagataagcaacggccgctttcatgacttctgcactttgcaacacttctgcaacgattaattcattggcgttaaacagccggccaacttcatccatgcccgccatcagcggtccatttataatggcaagtggcgtgtcatacaggcgcaaagcttcagctaagtctgtctcaagtcgttcttttgtcccttcgacaatataggcagcgagtctctcttctaaggacatgtttgcatactcgacttttttctcagttttcttcccacgataaaaatcagtaaacgccgccaaatgggcatcattcgtttgaaacaacagccgatcggctagctgtttctcctcatcaggaatgctcgcataacgttccagcttttcggtattgacaatcgcataatcaagccctgcttgtgtacagtgatacaaaaagactgcgtttaaaacttcacggccaactggcggaaggccaaaagagacattcgagactcctaaaatcgttaggcattggggcagctctttttttataagggcaatcccttcaacggtcgctgctgccgagcccatgtattgttcgtctcctgttcctacaggaaacacaagcgggtcaaaaatgatgtcatgaggcggaatgttgtacttttcggttaacagcttatacgatcgcttcgccacggccaattttctttccgctgtgacagccatccctatttcatcaatagttcctactacaatggcggcgccatactttttcacaagtggcagcactgcggcaaatcgctcttcgccatcttctaagttaatggagttaataatcgcctttccttgggaataggtaagcgctcgttcgatgaccgcttcatcagtagaatcaatcattagcggcactttgactttgttgacgacatagttcagaaaagcagccatgtcctcttgctcgtttcgatctggatctgctaagcaaatgtctatgacgtgtgccccacgcttcacttgagctcttgcgatttccgctgcttgttcatattccccttcttcaatcagccgtttaaatttccgtgagccaattacatttgtacgttctccaacgaaaagcgggcgcatcgagtcgtcatacaacaacggctcaatccctgatacagcatgggtttgacgtgttttcgccttgcggggcgggtacttcttgatcacttcaaccatttttttaatgtgggcaggcgtcgtcccacagcagccgccaactacatttaaccaacctttggcagcaaatccttcaagttttttcacaagcgaatctggtgtctcgtggtaaacaccatcttcgtcgggcaacccagcatttgggtaacagctcacattcgtttcagcaagttctgcgagggagcgaatgtggtcgcgcatgaactccggcccagttgcgcaatttaagccaacgacggctggcttcatatgttcaagcgacaaatagaaggcctccactgtctgtcccgccaacgtcgtacccatcggttcaatcgttcccgataccatgagtggcaacgttcgcccggtacgtctgaatgcctcgcttatcccaagatacgcggctttaacattgcgcatatcttggctcgtttccagcaacaaaacgtcacagcctccatcaattaaagcacgggcttgttcttcgtacgcttcaattagttcttggaatgtcgtccccccagttacagacaatgactttgtcgtcgggcccatcgctccagcaacgaaacggggtttttctggttttgatgcgcgatccgcctcgatccgggctagtcgagcggcttccttgctaaggtcataggctaaatgggcaaggtcgtaatccgcaagaacgatgctcgtagaaccgaacgtattggtggaaataatgtctgcccctgcctctaaatattttttataaatgtcagatacaatatgaggcgccgtttgatttaaatactcattgcagccttcatatgcttctccaccaaaatcggctgcggtcaagtttgcttcttgcaacatcgtccccattgctccatctagcacaaggatcgattgctttagctgcttttcaaatagagattctgtcatattcgttcgccttccatcgtgtggtttatcgggttcgctatcgctcggcaatgggtggcaagtgctgcagttaattcataacgtaaaaacggtgtgactaaatacaagccgttaaaataggcactagctgcgtctgctagctccatcgcaatttgcaagccttcttgctcggctttttctttgtcgtttccacatgccgccatccgtgctcttgtctcgtcgctcaatgtcattcctggcacttcattatgaagaaactccgcattgcggctgcttgttagcggcataatgccaacaaaaatcggcacaggcaaatgcttcgttgcgtcatacaattgttcaaattgttgttcatcgaaaatgggctgtgtcagaaaataatcagcgccagcttcgattttcttttctaaacgtcgcaccgctttatcaagatgcttaacatggggattaaacgctgccgctgtcgaaaaagttgctttactgccaagggagtttccagagaatgaaatcccttcattcatttgcttaattaaaggcaacaattttaacgaagatacatcatatacagatgttgctccgggaaaatcaccgatcttgcttggatcgccagtgataacaagtaaatcatgaagctccgctagatggagccccattaagtgtgattgcatgccaatcaaattgcggtcacggcatgttaagtggacaaggctacgcaaccctaactgttcccttactaacatcgccaacgtttggttgtcaacacgaggattagcaagagaattgtcggcaagcgttaacgcatctacccctgcctcttttaacgctttggctccttccataaatttcgcaatcgttaattttttcggcggatcaagttcaacaataattgtttgtttgcgccttgccaattggtccaacggctcactgagccgctctccccttcctggtccttcctcctgaagttggcttggtcgcctgacaatgagcgagcgtgttttcggcgtgttcgtttccactgctttggcgatcgcggcaatatgtgcaggcgttgtgccacagcagccgccaatcaaatggacgccttgttcaataaacgcccctgtcatttcataaaagtaatcggtattggaagcataaacaaagcgcccgtcccggtaacctggcaaactggcatttggatagcaagcaagtggaaaagctgacgataattcaagctgttccaaagagcggagcatatgataagggcccatacggcaattgattcctaaaacgtccgctcctaattcatgcagttgctcgagcgcttcacctaggggaatgccgccatttaagacgccgatatcgcccatcgacacgttcataataatcgccttgtctgtaagacgccttgccagggctactgcttcttttgcctcttcaaaatcataaaacgtttcaaacaataacccgtcaacgcctgcttccaagagggccgttatttgttcaagtaaagcagctgtaatcaccttgttttccgtatcttcatggaggaacccgcgaatcccgccgattgtgccaactaacgcaagctgttcgttgttgccaatcgcttttttcgcaatgccgacggcggcgctattgatgtctgccacactttcgtttaatccatattttttaagtttgacggcatttgctgcatacgtattggtttgtagcagtttcgcacctgcctcaatatacgatcgatgcacatggtaaacagcgtctggctgggaaaggtttaattcttcgtaacataaatcaaaaccttgctcgtataaaagcgtgcccatagccccatctccaacgattaagctcgtttttaacttatcgcgaagttccatcgtattccctcctaggattttttagcggccgcaattgcttgcagcaaatcagctacaatatcttctccgttttcaatgccgactgagaaacggagcaatccgtcatccactccatttgcaagtctgatctcttctggaatatcagcgtgcgtttgtgttgctggatatgtcattaaactttcgacaccaccgaggctttccgcgaacgaaattaattgcaaatgttttagcaacggattgacccaagcttcgttttgaacacgaaacgacagcattccgcctctcccaggataaagcacgtctacaatgccgtctgtttgctccaatgcatgcaccacttttttagcgttttcctcatgcttggccatccgcaatgccaatgtcttcattcctcgaataagcagccaagaatcaaatgcacctaaaataccgccagcaccattatgataataagcgagccgttcacaaagatcggctcctttcgcaacgataagcccagcaacgacatcgttatggcctcctaagtactttgtcgccgaatggatcacgatgtctgctccttccgttagtggcttctgcaaaagcggcgtataaaatgtgttatcgacaatgagcagcaaatcgtgttttttggcgagagcagccagcgctggaatcgaggcttcctgcataagtgggttagtcggcgtctcgataaaaatggctttcacgttagaatgaatggcttgttcgacttcttgcaaattccgtggatccacatatgtaaaggacacgccccaccttgtccagcctccttcaaacagacggtacgtaccgccatataaatctttcgaacagatgatcccatcgccttgctcaaacaacgaaagcacaatttgaacagcagccatgccagagctagtcgcaaatccgcgctcaccttcttctaattccgcaatcgctttttcgagcacgtcccttgtcggattgcctgtacgggcataatcatacccagtcgattcgccaatacctggatggcgatatgctgttgaaaaataaacaggcgtgtttactgcgccagtaggttcatcgcggcgattgccaatttgcgctaatatggtttcagctcgtttttccattctagttccccccaatgtgttctattgccaaacaaaaaacccttctccaagattagaagaagggattgcttacgtgcatgcttctcttatcttgcagataaactgctggatttagcacctgaccatggttggctggttgctgaagcttcattgggccattccctccacttctcttgataagaacctattcaattgttgaacaccatttataagtttcttccactttaccgcaactttcacgcaagtgcaaccattatttcagtgccactctctccatcgtttataacgcgaaaaaaaaatcgccactaatgatggcgattattccgggtttgcttcaacaatcaattgatcttcatttccgcagacgcactgtttaaacccggtctcgtattcaccttgctcattgcgcttgccgcgcaaaatgtatttctccccacatacagggcagcgaatgacgatgcgatagcggttggctgtagacataattgaatcccccttcgtgttaaatgttcgcttacacagtgaaacggcttttaggctgtagacaaacgctcgcatacaacatcgtttgacaagcgtatcggtcttgtgattttaaacagtaaaacggcttgcttttttcagcttccatatcgcgagaagccaaagaatgaccataaatggaatcatcgcataaaggacgtaatggccaaagcttgataaaataaaatcatatccgccatgcaataggattggcagaatcgccccaaggagtaaaaacacttttttatggtcttctttgtacttcgcttgtccaatgtaatagcccatcacaatcccgtaaacagcatgtgccgttgttggcaaaacagttcgtgggatagctgcctctaacccataagcgatcatgtataagccattttcaactgtagcaaagccaagggagacggaaacaccgaacaaaatgccgtcccctgggcgctgaagctgtccatgttggtaggcaaatacaaacaacatgagccattttaacccttcttccagaaacccgtaaagcaaaaacgctttagccgctggatggggaaagacattttcttcagtaaaggcaaactggatcaccaaaatcggcacgactagcagtgcgccgataatgaaaatccggagaacgagaaacatttttgctttgctgtatacatcgcgcaaatagacatatgaaaacaatgccatggccggagccagtgcagctagaacaagggataccatggctgaccgcctactctctttggttcgctaatagaacattccttttttctagtataaaaccggcttgttccgatcagcaagcgccatcacgtaaacccagctgctagttccttgttcgctgccagcatgaccattgctttaatccgtgctttcttgctgtcataatcggagccgagaataacgcccatttgttcgagttggtgggcacttcctttgtagtcatacgttgggtatactttcccttcttctgaggcggtcgtcacaatgattggcttcttgttggcaaccgctcgttccaacgtagctactaggtttggaggaacttggccgcggccaacgccttcaaccaccatcccgtcgcatactgcaatcatcccttccagcatgtctgcgctcatgcctaaataaactttagcaatgccaatttgtttaagaggcgtattgccaatttcataaaactcccggcgaacaggcttttgatacgtaaaaatcacatcgttgtctataattcctaaatagccgaaaccaaaggcattgaacccttgcaaattggaggcatgctcttttttgacataacgggctgcaaaaatccgctcgttaaacacgacgacacagccagtgtgctttaaatcaggttcacaagcagcataaatggcatgacgcaaattcataaacgcatcactgcctgtttgctctggtccccgttgagaacctgtgacgattatgggacgctcgtctttgttcgttaagtctaaaaaataagctgtttcttcaagcgtatctgtgccgtgtgtgacgacaatcccgttaatcgtctcgtctgcaaaagcacgctctacttcatgctttaacaacagccaatcggcgagtgtcatatgaacgcttggcttttgcaatacagagcgcacgcttacatggatgtcttccggcaaaccacatagctttgccaactcttctccagaaagttcaccagcaaccaatttgccgctttcgcttgtagtgcttgcaatcgtgcctccagttgtcagcaacatcacatggcgcatattcatcactccatttcgattctgcgcgcaattgcttgtgcaatcaaagggccgtggagacgaccattttcaataaaaatttcattagcattgtttccagcagcaatgacgccggcgataaaaatgccttccacatttgtttccatcgtttgctcgtcatatacaggccgtcctgttgcttcatcgacatgtacaccaagactgcgaataaaggagtgatcagggtgatagcccgtcatcgcaaacacaaactgcgctttagctttgtgctcttgtttccctatccggtagtgtacgtggctatccgtaatctcatacacatcggcatgaaaggccaatttgatcttttcattacgcacaagggacacaagctctggcaaaatccacggctttacgcttgccgaataatcgctgccccgataaagcatagtgacgcgggcacccgctttttctaactcaagcgccgcatcaacagccgaatttttgccacctatcacaaccacatcatggtcaaaataaggatgggcttctttaaaatagtgcatcacatggcttttatcttcacctggtattcccatcatattgggagaatcataatagcctgtggccacaatcacatgcttcgcatcaagtgttccttttgtcgtcgtcacttcaaatgaacgatcagcccgttttactacacggagcactttttcaaatgcacgaatgtggagcctttttaattttgctacattccgataatagacaagcgcctggttcctccggggtttgcggtcctccacaatgaaagggacgccgcctatttctaagcgttcgcttgtactgaaaaaggtttggtgcgttggatagcggtaaattgagtggacaatgttctctttttccacaacaacagcagacaaccccttttcttgacatgcaattgccgcagcaaggccacacgggccgccgccaataatgactgcatctaccacattcctcacctcatcaaaacattcaaaacccttgtcctcaaaggcaactttggacaagggcacttattttctcatcatagtatagcagatcaaacccatccacggaaccgagaagcttcggccatgcgtctcacaccgaccatataggcagcgagacgcatgtcgactttacgacgtaaagcaaggttgtaaatgttgttaaacgcttccgtcagcactgtccgcaaccgtccttcgacttcttcatccgtccagtagtagccctggttgttttgcacccattcaaagtaagagaccgttacgcccccagcacttgccaagacatcaggcacaagcaaaataccccgttctgcaaggatttgcgtggcctcaagcgtagtcgggccattagctgcttcgacgacaatcgctgcttttaacttgcctgcattgtgtgaggtgatttggttttcaattgctgccggaaccaaaatatcacaatctttttctaatagctcctcatttgtaatcgtatctttaaataaatttgttactgtcccgaaactatcgcggcgatcaagcaaatagtcaatatctaaaccttcttctgcataaagagcgccatatgcatcggcaattcccactactaatgcccctgcgtcggccataaacttcgccaaaaagctccctgcattgccaaacccttgaatgatgacgcgcgccccttcaaggtcaattcctttcttttttgccgcttccataatgcaaatcgtcacaccttttgcagtcgctgcctctcggccatgtgaccccccgagcacaagcggctttcccgtaataaaattgggtgagtcaaattcgcgaattcggctatattcatcaagcatccacgccatgatttgcgaattggtaaaaacatctggcgctggaatgtcttttgtcgggccaacaatttggctaatcgcgcggacatagccacgacttagacgttccacttctctaaacgacatctgtcttgggtcgcaaacaatgcctccttttcctccaccgtatggcaagttgacaatgcctgcttttaaactcatccaaatcgacagcgccttgacttctttttcactaacatctggatgaaaccgtacgcctccttttgtgggaccaacagcgtcattatgttgggcacggtagcctgtaaaaattttcgttgatccatcatccattcttacaggaatacggacggtcaacatccgtacaggctctttaagtagttcatacatttcatctggatagcctagtttttttagcgccttatgtataatggactgagtcgctgcaagaacatctaatttatcctcttggttttcgtccatcttttccacctctttggaagtcagctgctcacatctttatcttaatgaaatgctcacataattgccatccttttttctaaaaaccaattagtcttctgaaacaagttccatgccttcaatcagttcgactgcctgttgttgcgaccaatccctcatcgtgaacagttcatagagaagcccgtcttccgtccaatttgcataatgacttgacggttcccaattaaaatggacctcaatgccacgaacgggctccgtctcactttcgccaatccattccaaaccgtggctttttgagacggtcaatccaatttctttgccttcgctatcgacatacgacgcaacaacagaagcgtcctcactgccgccgtcatacagctcaatgttttccagcttcaagccgtttacctcgtttggcaagcgtagcgatttgtcaaaggcgtcagctaattcgtttttctcaatttggacaggttcctcttcacctactaaaacaaatccatcttcctccacatcaaaccaaccctcaggaaagtcaggcttaaaacgaacctcgacggcttcccctgccacgacttgatcagagtatgtatacaccgtctttagttggaggtacgttttcttgtcgacccataactccgcttccaagacgtggtcagtctcagaataaaaatggagtttaaatacatcccgttttaaaaagcgttcgccttcaacaacttcgatctcatggtttttcaacaaataattcacttcatcaagcaacgcttcttttggagtaagcgggttcatcgcttcttctgcgtttgcttcgtaaattaattttgattcatagtctttttcataaatatggccatcaacatataaagaagtggacaacagttggccgtcttgggcaaagtcgacccgttgcgtttgctcgtcttttgcatagaccgactcgctgtagccatcatcaaattctttaatgagcgtataaggaacaaacttttcttctcttgcaagggcttgttctagcacctcttcagcattgatgctcataaagctgcacccgcctgtaaacaacaaccctgttatagccgctaaaaaaagcggttgccgtttcattcatttcccccctcagtttttatgcacggaatggaaaagaaaaacgtacttccatgtggtggcgacgaatagacatcaattgtgcctccatgttgatgaatcagctcccggcaaatagacagtcctaagcctacccccttgtcgtttgtttggcttctcgcctgttctacttgaaaaaacgggtcaaagagctggcgttgtacgccacttgggatgccttgtccttcatctttaacaaaaatatagagtcgctgttcatttgtccgttccacgaatggtggcaaacaagactgcttgtttgttgcatacaaggaaatcgctcctccttcaggcgaatagcaaatggcattggtaaccaaattgtccatgacttgaacaaggcggcctgcatctgcatcgacttcagccggctctatctccatgctcgtacttaaccttagctgctctttttcaaggtcgtagccatcaaacaacaattcgacaagctcttctgcatcgactttttttaacgacaaactaaagctcgttgaatgaacttgggagaaaatcagtaaatcttcaatcaatcgttgcatatactcagtctttgctaaaataaccttgctgtactcctcccttttgtcagggtgggcgttcatcccttccgcatacgcacgtatcgatgttaaaggcgtccgtaaatcatgtgaaatcgccgcaatcagctttttacgatcttcgtcatcactttgtttttgcgcatcaattgcacgcaaatgcgctgccatgttcgcaaaattgcccatcagttggccaacttccgtgcggccacgcttcactggagtcgtacgattttgtttcccataagccacttcgtccatttccgctttcatccaagcaaaaggaacgagcatattccgtttaaaccagtgctggacaatgaaaagcgtgatacctaccgttataaggaaaaacaggatcgtcagcatgtagacttccttcgtttccttgcgtatgccgcttttgtcaaagtgaagctcaaagtagcctgcaatttggtcttgcaaaaaaatcggctccttgtaaatgtaggccgaatcacttgattgccaactatacaaattgctgaacatggcctctggcgtaaggtgggtggcaaatcccccttcctcagaggagctttggaattgcaaagcccgatcctttgaataaagacctagctggacgttttcatgttgtttgagcgccaatcggccaagctccttcgccgagccatcaaacatttgtgcattctgatttagcgttcggcttatgcttttagcgacaatcatcgattctaaatggttacttgactcttctttcgccacacggtttagttggtatgaaaataagcttgtcgcgataaacgggacaagcgcggttgcgagcaagagcaagtttaactgccccctaagcttcatcggttcccaagtcctataaatttataaccaacgccccataccgtttctatgtatttcggatgcttcgtcccgtcttttaatttgtgtctgacatttttcacatgaactgtaaccgtcctgctgtcaaagccatcgccattccatactgctgcgtacagctcttcttttgtaaaaacgcgccctgggtggttggctaaaaacagcagcagttcaaattcttttgctgtaagagaaatctgctcgccacgggcgaaaacacgcctgcctgttatgtcgatttctacatctataaattgaagcctgtcttcttgctgtgggtacgaccgttcataacggcgaatttgcgctttcacccttgccgttagttcaaggggactaaatggctttgtcacatagtcatctgcgcctaacccgaaactttggactttgtcgaaatcagtttgctttgcactaacaacaataatgggcacttctgaactggcacgaattttctcacacaaagcaaacccatccattttcggaagcatcaaatcgattaatacaagctggtacgcaccttcacaaaaggcatggtagccgctttccccatcagcttgccatacgactttaaaggattccctctctaaatactctttcacaatcgttgcaattgatcgatcatcttcgattaacaatattgccataaaccgttctcacactcctaaaatgctaccccttatcaaaccaaggtttcatttcgtttgatgcttttcgctcaagtacttgttatttttgtttacgaaaaaagcagcgaaaggtttcatgcctttcgctacacctagctacgttttcagataaaaaatccgataaagctgttcaatcgcttgtgccggcattaacgcttttccatattcgcaaatacgatggaaagaggtcgttgccgggctgccaaattctgataaaatcgctataagggctgcttcattcacttcttcaagctctgcttcgttaaactttaagtagaagcgcgtttgataggaatgcaattcgccgcctagcatgtcaatggcatgtagacgagatgcgagaccaatgacatcttcaaacgaagaaaattcataaaaaacttcgtcggtctcgtctaaagtcaattgcatttcaatgaatccttcttcatagtcttcggcatcatactcgtcagcagggtcgcctttcgtaataataaagaccatgccctgcgctggcatcgcaaacacttcaaccgcaatcggcccatcgattttaaaacctagctcgtcatctgcttccagcatcatatcccggaataagtcatggactttcggaacatcttgccacaagtcttcttttgtaatccctctttcgtccatatcatcataggttaaaaaaaccttaaatttatcgattgctaaacgctctaagcgcataccagcccctcctttatgcccgtatggttctctcgcgcgtatctatacgatacggtatgtggatacgcaaaagatggttctcaaaatcattatttttcctaaatccaatttttaaggttgcagcattcgttcaacccaaatttcccagtctgctcttgacttgccgatgaacatcgtctcacagtttgctttcttgttgtcagggagctcgggaaacccttttccaagcaaccctattttcgtgttaggctgtttttttatcacttgtttcaaccagtcctcagcagcctgcatattctgttcgtctctgcaagaaactgcaacaagaataggcgcgcattgctgcacaaccaattctgcatcttcaacagaaattcctgtcccaaaacagattgtgctaaagcctttccgtttcaaataaaaggcaaagatccttaacggcaaagccgattgttcatgagggccgcaaaacaacaaaattttttgcttcgacttgtcagcaggtagcaccattgccaaatttgtgattttcgcctccatggctcgtacagcatattgttgatgagcaagtgtaatcgttccttgccttctttcctgttcaagcatgtcgtaggcgatgctgaacagttcaatcgccacacgttccatcgaatacatactaaaagcgcggttcagccattcttgggcttgttcttcgtcaaaggcgagcaaagcttttagaaaatccgtggcaaggtggcttatatagctcgaattatccgttgctgtactccattccccgctcgctttgtcagcctcttttagttcaacggcttgtttaatggaaaatccttcattgactttttcaattagccagcggagcacggcaatgtgttcgtctgtatacaaacgatggccgctttcgttccgatccgggttaatcgcctggtatcgcctttcccacgcccttaacgttcccgggtgaatccctaatttcttggaaacggcctttatgttatacttcccatctttagaggtcatcatcctgcctttgccccctattcctccacctttgctgtgcttggtttgatcgtaatcgcatgaacttcaggcgccgcgcccaaacgaaggggcacagatgtcgttccatacccattgctcacgagtttcaaaaatccgccttcctgtacaagtccgccttttttctctaagccgaaaccaaagacacggatttgcccgccatgcgtatgtccacaaagcatcacgtccacatccctcccatgtagggaatggcttacatttgggtaatggcaaaggacaattgtataagtgtcctgtttgtcggcaaaaagcttgtccagttcttcctcgctatagtctctgtcgctaagtccaatgattgtgacaggagtttcctttatcgttatcgttgttcgtttattgtctaaatagcttacgccatatttatgaaggcttgcagcaagccattgttgatcgacttcatcgtcattgttgcctcgcacaaaataaacaggcgccaattcaactaatttttgtaagttctcttcagtccgtgcttttggagcagctctctctgttagatctccaccgatcaataccgcatcgcaacgctctctcgccatatccaatatttcatcggcaattcgccgccggtggatatccgaaataaacaaaagctcgattggatctgcttttgttgggattttcgtgcttgagaaagtgtggaagcggacattgttttcttgggcttgtctcaccatatgcatcgccaaggcgcccccagcaaaagcaacagcggtttttatccagaatttccacatttccattaagctccttgtcattcgaaaagtatagttgtatcataccacattcctgccataattgccttatttggcaacttttctcggccaattgttcgcttgaacaaaacgaacaaaaaaacggaggcttatgattcgcctccgtgttactttttatctccagtgcctaagaaggataaagcagctgcgcctaggtgtttggcggccacaagcatagcccgctcgtcaatatcaaacttagggtggtggtgaggataaacgatccccttctcctcatttccagcaccagtgaaaaagaacgcgcctggaacacgttgtaaataataagaaaagtcttctccacccataacaggctcgatttcatgcaacttttctgctgggtgaaacgatgccgctgtttccattaaaagttccgtcattttactgtcattcacaacagctggatacccttttgcgtaagtaaacgaataagtcgctccgctcgcctcgcatacccctttgatcgtttcttccatacgggcaattaattggtcttgtacgttttcactaaacgtccttaccgtcccttctaatttcgccgtatcgctaatgacgttgaaagcacctccggcgtggaaagaagcgattgtgacaactgccggttctaaagggttgacattgcggctcactagctgttggagcatcagcgctacagacgagccgaccatgacagcatcgactgtttcatggggaagagctccgtgcccgccttttccttgtatatttacttcaaagcggtctgaagcagccatcaaacggtcatatgaatagccaacttccccataaggaagagggctccacaaatgggtgccaaaaatggcgtccaccccatctaaacaaccatcttcaatcattgcaatcgcaccgcctggggcaaattcttctgcaaattgatggatgagaacaaccgtcccttctaactcatcacgcatcgccacaagcgcttttgccaatacgagcaatgtagcggtatggccatcatggccgcaagcatgcattttcccaggaattttcgaagcaaacggcagccctgtttcttcttggattggcaacgcatcaaaatcagcccgcaatgctactgttttgcctggttttttgcctttgatcgtcccgacgacaccacgtccccctacttgtgtgcgcacgtcaataccaagattttgcaaataggaagcaatttttcttggtgttacttcttcttcaaaggccagttcaggctcagcatgaaaatcccggcgcaattccaccatttctgggtaaagtgattcaagttttttaaacaacgactcttgcaccgacacccctcctcatttatgtacaaaaaaggtaccctaaaaggataccatcaaataaaacatactgccttaatcagagttctgggacattttcaaaagcataaacgccatcgaaaccgccacagcaatggcagttagaccgatgccgagaattgaaattaattgagacccgctcattcttgtccactccttgctttatctgccttaaagaaaacgaatacatctccagtatagcataacgggaggcggttttgaaaggctatccaacaagcgcttatcattttcctgttacgacctctgccgcctccttattgataccccttccacagccttctccttaactcgcctaatttttttgcgactctcccctaatatgagcacaaagccaactaagattgagctgtatgacgtaaggatccgccaaaacacgagtgcaattaacaatgttgctggcgatacaaaagactggaacagcccgctaaacgtcatctcagccgcaccactgccgccaggggtcggcacaactgttgcaaacatgaccacaaacgcatggaacactgtgccaattaaaagggtgatattcggcgcaccaagtgcctgaaaaataaaataaggcacgctgaaaaacagcaatagttgtgcagtagttaataaagatgtaaccaagagagcacgcttgctccgcacaagttgcctgcttttttcatgaaaatcgactaacgccccgcctaatttgattttccattcaactgccttacgcttgctaaaaaagcgaacagggtagagaatcccgtaggcaagtttttccgccagcttccggtaaaacacgacgagcaacatcgccacaatcacaacaacatggactccataaccaatcagcatgagcagtttcaactgtggcattgcttgcgccaacgctccatagcctacgattaaaattccggaaaagcttaacacaagcacgacttggaagacgagaaatttcattaacaaaatcgacgtggcacttccaccaggcacaccttttttcactaatacgtaaagctgtgcaggttgcccccctgctgccattggtgtaatttgattaaacatttggcctatcattgtggaataaaagctgtcgaataaccccagctttgctctttttccgaccatcacttttagaacagctgcttccaagagccatgacaacaacagaataaccgccgcaagagcaagccaagttaagtgggcttggcgaatgccttcaatagctgcctccaagctaacattccgcgccaggaaaaacacgcacagggcgccgagcaaaatgactagcgctagttgtaaaaatatttgtttcttattcatgccctggctcccttattttgaggaggcttgaataaaaggcgtcccactcgttaagcaatcgttcttctgagtagaagcttgccccttttttagctcgttcgaccgtctgctcataaaaactgcggtcggcctccaaacgtgctatcgtcgccgcaaacgcttcgttcgttccagcccgctcataaaaatcaaataatatgttttcatataaaggcaaatctctaagtagcaacggcttattacagctcattgcctctaaaattgtcatcgggaacaactcatgataagacggcgaaaaaagcaaatccgctgcattgtagcaatgcttcatctcatggcgttcaaggattcctataaaatggacattttccggcgggttttccactagttttttcaattcggcatatccagcagttaactgcccaaacgaaaaaccgcctgcccaaacgaaatgtatatgtttaaggcgtttggcgacatccagaaaatccaatacgccttttcggtgttggatttgccctgcacctaacacgacaaacgcctgctccggaatattgaaccgctgtctaaacgcgattctctcttcctcagtcccttcagaaaacccttctttagacacaaagtttggaatgtaggatacccggtcacgctcaattccatactgagccaacttgtcgataaaggaagggtttacgacaacaagtcggtccatccgcttataaaaggcgagaatgtatttgtaaaacacacgtcgaaagaagcgtggcaactgcaagctatcgtcaaccgtttcaggtaaaaaatgaacgtagcctacgtttatgcctcttttccgcgagaatgacgcaaggtaaaactttaagtcaatagtgtggtaatgagtaatatccgcagcttgaaatgtattcaattgaagatcgtatttatgttgtgcttttcgctccagaacgttgactagttcccggtaggcagaggcgaccccctgcccttttactttttctgcagacgataacatttcgagtttaatcataatgactgctcttttcgataaaggattgcttgcctaagtttaggcgaactgttttcgatttttttgtttttggcgagctcaaaataagtttgttctactttggcgccaaacgcttctgcggttaatggctgaatttgtttcttggcagctttgcgcactttcgataaatgggatgagtgcagcaaacggcgcaaaagtggtccaagatcctcatcttctttaaatacaaaaccagttgtgccgtctaagacaatccgtttaatacttggatcagacttggccactacaatgcagcctgaagccattgcttcaatataggtaaggccttgcgcttcagtcgtcgaggcacttacgaacaaatcacctaaatggtagtaatggtggatctggttccactcaacagcaccagtaaagcggacatgctcgctaattccaagggatacagccagcgcttcaagagactttcggacaggcccgtctccaaccatcaccgttttcacatgatccaattcgctctccaatgatttgattgcgtacaagagcgcctccatgtttttttcttctgccatccggccaatgctaataatgactttgtcactttcattgatcgcaagttttttccttaacgccaacacatccaccaagcttgcttcagaacgtttaaactgcttcactgagacgcctgtcgggatgacataaattggttcgctcactttataacggcgcaaataggtcttcactttttccgtaggtgcaatgacagcatcagcaccgcggcaaaaccattttgttaaacggccaaccattttcggagacaacagctttcctcgtgcaatgtaatgaacatagtcttcatacatcgtgtggtatgtatgaatgtgaggaagcttacatttatgtgcaagatgctttcctaagcatcccattgtaaattctgtgtgggtatggacgatttcgatgtttagttccttcatcagttttgtcgctctgcgtatcccagcgtaagctaagcgtcgttcgggcacaaatccaacagcaaggcttgaaaaccgaaaaaccttcccctcctcctgttctggatctgccgctttatccgttgaggtaaaaatgtaaacgcgatgaccccgggcgctcaattctttttcaagtgttgcaatagacgaagccaccccgctaatttgcggaaaataggtgtcggtaaagatcccaatattcatgttattcctctttccttttctgaaatggagcttactttctcaatagaacactagtaaagtataaagcttcttgccaataaaagaagaaagatcccatttctttttataaaaattttagaattaagcccatttccttttcaatcaaaggagaatcaatcttgttctagtgttctattcaaatagtacactaatactatgatatctgcaaatacattgtgtcgtttgccagttttttcgctctttaagtctgtcttaaaaggctataccggcataagtgggccgaagtttctttttgacatcatacaccatatcatccattcgctctgctataacaattggttcaatagacgccatcgacggcctctcctccttttgccccgtgttgccagcttgccagtagctgtttatcccttcgctgacttattgactatcgataaccgattaaatgcctttttattttatctgtctcctttcacctcacatacaaacttttgtgctaataaacggtcacccttacaaacccggaaaaccaacaatatgttcgatagaatcgaatgaacgacttgcatttggacgtttaggaactcatcaccatcttaattccttttgaaaatcattgccacctacgcatttattttaacaatccgtcccaaaaagcgcgataccctttagaatggtcttgcactcagtctctagcctgatattactgttgtcttcattggctaaaaaatggtcttgttcctgcttactatgtttattttctttgcaattgattgttttcgattgaataaaaaaacgccaaagttggcgcttgaaagacttactattttttataacggacacatgtccccatataaaaaggaatccgtcttttttatttgttagactggcttttatcattttttgtttcttttccattttgtaaatcattagttaacacatcgtcaaaaaagagatcatcgggctttaaggaaaaaacagccgcaattcggtaagcaagttcataagaaagccctcttttcccattttctatttgccaatagaatggggtactcacgttaattttttttgctactgcctctaacgtcatttggtgctccaatcgaacttttttcaatgtttcccgctgcaatacgatcacctcatttgattaactaaaagttaactacagtatatccttcccagtttcttctgtaaatacaattgtttctatttagttaaccgaatttacgttagcgatttgttaacatataatacaggtagaccgagcagaaagggttgtgcatatgacaattgttccagagcggctaaaaacattaaggaaagaacgacagcttacccaggaacagctaggcgagctgatcaatgtaacaaaagtgtccatatcaggttatgaaaatggcaaccgcacccctgacaccgatacattacgccgccttgcagatgtcttcggtgtttcaaccgattatctgctagggcgttccaaagagaaaaatggctctttcttttatgacaacgaacttacgcacaaagaggcacagttattgcgtgaacaccttgcctttatccgcttccaggccaataaaaaggaaagtgaaacagactaataaacgagatgtgcaggcaagtgtgcagaggcctttgcatagcggttttaaagcagatgaacgaggtagacgaccgacatctatgaatgtatgtttgttacaaacgaaaacagcttgctaagcaggctgtttttttttagcttatctgtttatctatatctcattcgaaataaaacaagttgatggagtagcgcgtttgcatttcttttaaataggcttctttctcggctgcgctacgctcagctggccaaaactcttcgctgcgctcgataaactcgttgcgcagcgcctcaaattccttttctttttttgccgctttctttgataaataaacaagtccaataagagacaaaaagagcacgacgagtaaagttgttgacaatggcgaagccagcaacgctttgggaaagaccgtgcgcccagtttgaggttcattcaaaagaattacaaatgtgcacccactaatgagtgcagcccacccgcaaaacaagtgttgtttctccaagcggtcccactctgctttacgtttaatcaactctttcgtaatcatctctagtgccagttgtcctcccatcgcctgacccctcccatacgtaatctatgggaaaggctgtccttttagaacaaatagaacgagactgctaagcttgtgaaaacaagcaaaaagaaaagaacagcgagcatatgggcaatgggagagaccactgcttttttcttgtctttatgtttctttttatggtgccgtacttttgaacggggaggcagcgtttcaggttctccttggttttctaaatcaatcggctgttcgctcattggcatcccctcctactttctgttcttagcatttaaaacaaaggcaagaacagcgttaatgaaaaaatgcgcacatactacagtcgcaaagttccctgtcacctcaaacgtccagccaagccctatgcttataacgagtacgtaagcaaacagcacaggctttgttacatagcgaaaatggacaatcgcaaacagcagactcgccagcggcagcccaacgagctgttgcaaaaccgctctgaatagccattcctcgcagaaggccaccaacaagcaaaaacagacaatatggacagggcccatgccggtaaaaacacgctcattcaatcccccatcatcaagccagccttttggcagcaacacgacaagcagccaatttagaagcagagcggcaacagcaaacaaacttccgttccctattcccgtagcccactgaaattcaaggctgtgccaaatgccaactggtccgcctgtatagaaaaagcttaacgcgatgccaatgaccaaaagcagcaattgcgaaccgtataggctgatgtagaaatcttttttatccagctgagtggtggcgcggcggtttgctttcatcattttccctccgccactgcaaaaacggctttaagctcttcttcccacaaaaacggcgcttcatttacgttaacaggcgtccgtttaaacgagtcaagggtaaggccacacacatcacagcacggattatggggggctggaacctcgtcgaaataagaaagtagttgttggcgccggcaagtttggtcatcacgaccatagtgaaacaccggtaacagccggttctgtttggcggcgatttgctctttaaaatggcggtggagcaaacttgttagttttgccattgaaaaggattggacaagccctcccttgattacaccccatttttctaacaaatagccaaccgtccgtgcttgatcggattgcatggctaaaagccggttctcaaatgatggaaaatcaagcggctctcctacttttaactgtgaaagtgcccatacccattcatcggcagtaaaatcgttttttttaagtaaatttttcgcttgtacacgatcttctcgagcagttagaagcaaagcaaagcttaaagccccatcgcgcccagcgcgaccaatttcttggatgtaggaggcgatgtcaagtgggtaatgcaaatggatgacataacgcacatctgttttgttaagccccatcccaaatgcgttcgtcgcacaaatcacatccagttggccattcataaattgttgttggacaagcaagcggtcagcgttttccatgccgccatgataaaagctcgtccgaacatgcttcacttcctgagcaagataagcgctgcatgcttctgcctgggctctgctctgaacataaataattcctggtgcttgataagtagcgaccatttccacaaggcgctgctgtttttgtgcttggtcagcagcctcctcagctagtagcacaatattggagcggttgacactctcaatatgttcaaacggtgtccgtaaatcaagctgctttttaatatcagcgcggacttctttcgttgctgtggctgtaatcgctaaacaaggcggtgaaccgagcgcctgtttaatgtcgcagatccgcaaataatcagcgcgaaagtcatgcccccaataagacacgcaatgggcttcatcgacgacaatataagcgactttgacctttgccaaagcagcgagcagttctcgtgattgcaacatttctggcgacgtgtacaacagtttcactcttgcaagattgcggagcaaacgtctccgttctgccttttccgtaaagctgttgagagcggccgtttgtttcagcccgattgatttcaactgctggacttggtcttccatcaatgcgagcagcggtgaaacgacaatcgtaaccccgttggcaagaaaagcaggcagctggtaacaaagggacttgccccgtcctgtcgggagcatagccaacacgtctgccccatttatgagcgcttcaatgatttctttttgcccttgcctaaatgaagtaaaaccaaacaaagcctgcaaatggcgttctaacattgtatgaatcctttcctcgccagcgtaagccgaatgtcaaaatacgtgacttcattgttaagcgctgttcgaatcgtttttaactttaatgtacggagttcgcggctgacgcgtaaaatgttcttttgcgtttcttcgctcacatagcggtctatcgggaaagagcggtcaaacaaagcaatttcgacaagatgatcttcaatcgtcgccggctttaagccgcgtatatgcgcgagctcttgcacggaatcaactctcgacaataaagaggcagtttttcgtgccgatgcagtgcttgtccggctttgtattgttggaagcaaatgtaaaagcacttcgtaatcgtgcggattttcactaatctcagccatcagtgcatggaggttgcttttatggcgtagttcaacttccattaaggaaagacgatagcgcaaggcaagctgttgcctcgtctccccgatccgcctttgccttgaaagctggagaacaaatagttcagcttgcagccggtcgcgctttcttaaaaaagcggcacattctttatataccttcatcctgtatcgatgccgttcggccggttttgggagtgcgcttttgacgaatcgttgtacatctaaatcaccgacgacaggaataaaagaagtccccgttgctaatgcatttaatgactgcacaagtagagcgaggcggttccaaaaaagcacatccgtttgttggaacaacccattgtttatatggtgcacgtaagaatggtcatgtagccaggcatccaactggatctcgcctttctcagtcagctgatgcgccccgtctgtttcgcggactttcccattttcaagcaacgcgttcacgacttgttccgcttcggtataggacaattggggcaaaagaccaaacaaaggaagagcgttgaacaaagcgccatcttgtatcgtttgggcggaacgcttgccttttaataaatgatacgccccgaataaagagcgttcgccttgaaaacgatggcaggcaagcataaaaagctgttctttcacgatttttccctctttcaatcgtgccttggttttcctcattgtatcaaaacagccttgtttttgtccttgtttgtcaattgcagttttgcttgttgcgcgctacaattgaatcagtttaggcttaaggggttctgccatgaaaaactgttatacgattgtcgaactagatacatgcattgcttgcggcgcctgtgggctcgttgccccagatgtgtatgattacaatgaagaagggctagcttacgctttccttgatcataatactggaaataagccacttcccgacttgctcgttgacgatgcaatcgatgcaaaagatggctgcccaacagactcgattaaaatttccgacaagccttttaacggcgatccgactaaatacgaataaaagattcgcttttgattaaagttatctgtcttttttcggtatttttcttttttataacaaacggggattagcgattacaagaaaaaccgaacttttttggttatgacgattgacttttctgcgttgccatgataaattatctaacaaatcaaattgctaaaaacgatgatgaagacatgaaaagcaaggccgattcagagagctggtgggagctgcaaaccagtgacagcctgtttggatagcccttctaagttgtcacgtcgaaaaacagtagacgtgtgccggcttctgccgttaccagtaaagatgcacatcttgtgcaaacaacgagggtggtaccgcgaacattcgcccctcacagcaaaattctgccgctgtggggggcgtttttcatttatgtaggaagaaccataaaaggagtggagtacaatgaaccaagttgcagagccaaaaacagcccaatttcatattctcgtagccgataccatgagcgaagaaggcctattgcctttgcttgaggctgaccatgtcgaggttacacaagcaagcgtcgacaacgctgggccattggagcaatacgacgccctgttaatccgcagtgccactacagtcaccgaggagctcctcagccgtatgccgcgcttgaaaatcgttgctcgtgccggcgtcggtgttgacaatgtagacatacaagcggcaaccaaacatggcgttgtcgtcattaacgcacctgacggcaacacgatttcaacggcggagcacacatttgcgatgatgtgcgccctgttgcgcaacattccacaagctaacgctagtgtcaaatcaggaaaatgggaccgcaaagcgtaccaagggactgaacttcggggaaaaacactcggcattgttggctttggccgtattggtacgcaattagccaaacgggccaaagcgtttgaaatgggcgtgcttgtgtatgatccatttttaacggctgaacgagcagaaaaacttgggattgcccaaggcgagttggaccatgtcttatcagttgctgatatcattactgtgcatacgccattaacgaaagacacaaaagggcttttgaatatggaaacaatcgcgaaaacaaagccaggagtgtttttaatcaattgcgcccgtggtggcattattgatgaacaggcattaaaacactacttaaacaacggccatgttgccggggctgctttggatgtgtttacagaagaaccagcgacagacaaagaattgattggccatcctagcgtagtggcaacgcctcacattgctgcttctacgaaagaagcgcagctaaacgtggctgcccaagtttctcaggaagtgctacaatttttaaacggtgagccggcattaaactcgattaatttgccagctatgccaaaagacgtttacgaaaaaatcaagccctattacgaccttgctaggacaatgggctccgtattatcacaattgatgcgtatccctgtccaagaaattgaagtgttctacagcggcacaacggccgaacaaaatacgagcgtgctaacgagaagccttatttccggttttcttcaaccacgcgttgatgcggctgtcaatgatgtcaacgcatcccttattgccaaagaacgtggcatttcctttggcgaaaagcatgtgacgaaaacattcggctactctaacctcatccaagcggttgtccacggcgaaggcagacagtttgaaatgaaggcgacttacatccatgaatacggtccacggattgtatcaatcaacggtttttcagtcgacgtcgtcgcagaagggcatattttatacattcaacattttgatcgtcctggcgttatcggcaaaatgggccaacttctcgctaagcatgacgtcaatatcgcaacgatgcaagtaggccggaaatcagccggcggcgaagcgattatgattgtccaagtcgataaacatgtcgatcaaactgtgatcgacggtttgttaacgtttgacgaaatcgctattgctaacgtcattgatttataagtcttgaaaaacatagacagcttttgctactaggcaggattcgccgatagcataaatgaacgatcacttgcctggccacctcgtttttcaacgaggtggcattcgttttcttctacttcccctacttccatagcgattctaaaaacaaaccagcatgtcagcttcaaaaaacatttgctcaccagttcacaatatgatatgatcaacttgaggattttgctcaatggttcacaaataaagaccactcttgtgaaattactcacattcttatacaggaggctacaacaatgaaaataattgtgattggttgtacccacgcgggtacgactgccgttaaaaatttgctccggctccatcctgacgctgacataaccgtctatgaacgaaacgacacagtctcctttttgtcttgcggaattgccttgcacgtcggcggtgtcgtcgagcatgctgaagacttgttttattcatctccacaagaattggctgctcttggcgcaagcatgcacgtccttcacgacgtgattaacgttgataatgaaaataaaaaaattcgtgttcgtaaccttcaaacaggtgaacaatttacggacaagtatgacaaactcgtatttacgacagggtccgctccagtcataccgtctattcctggtgtcggcttaaagaacattcagctttgcaaaaactattaccaagcacagcaaattattaaaaaagcaacgaacgcccaaaaaatagctgtcattggtgcgggctacattggcattgaactcgtggaggcatttgcaacaaacggcaaggacgtaacccttatcgaaggtgccaaccgtattttaaacaaatacctcgaccatgaatttactgataagattgaaactacattacgtgaacatcatgtgacgcttgcgctaggcgaaaaagtcgagtcatttatcggaaactcggcagggggcgtccaagctgtacaaacaagcaaacagacacacgaagcagaccttgtcttgctttgcgtcggctttaagccactaacagatctcattaaagataaagtcgacacacttgaaaatggcgctctacttgtgaatgaatatatgcaaacgagcgatcctaacatttttgctgctggagacaattgtgcagtatttcacaactctgccaaccacatggcgtacattcctcttgccaccaatgcaaccaaaatgggcacgcttgtggcgtacaatattaagcgcccgacctttgcctataaaggaacacaaggaacatctggactaaaattgtacgacctaaacattgcctctactggtttaacggaagaagcagcagcgatctatggccttgatgtccgttcgtttacattcaccgaccatgaacgcccgacattcatgccttctgctgaggaagttcgcataaagcttgttttcgaacaggaatcgcttcgtattgtcggtgcccaagttatgagcaagaccgatcagacacacctaatgaataccgtatcggtttgcatccaacagcagatgacggtgactgatttagcgtttgctgatttcttcttccaaccacattatagcaagcctattcacctgctgaactcgctcgcccttaacattcttgaacaaagggaaccaatgcaaaaaacagcagaagtacgcgtatcaacttaaatgacaaagcagccctcttttcaaggagtggctgcttttttacttgtccgtcaagccaatgccaaccgggtgctagaacagcgttttcgaaagcgtgcaccgccagctccaacacaacaacaaagttggtcgacaatctttaaggttgtagagaagcctttttcaaatccttagacgacttgaaccaagcgataaggacaattccagcaaatacggtccaaaagatcgttttccataacgaagattctgggaaatgctctggtaaaatgtgcaaatcaggatgggcaagtgtataaacaagaagttttacgccaacccagccaacgattaaataagcggctgtttcaaggcttggccgccattcaagcaatttaataaatttgcctgctgcaaaccgcataatcacaatgccgatgatcccaccacttaggacaacagcaaattgtgctccgtccagttggccaatgtttggccaatttgtcgctggcaatgtgacggcaagggcgacggccgctaaaatggaatcgaccgcaaatgcaaaatcggcaagctcgacttttacgactgttttccaaaatcctacaggcgctttcatcgcctttgcactctttgttttcttcttgacccattttcgatacaaatagtgaatcgacaaatacaacaagtaaatagcgcctattgcttgaatttgccaaacgtcgacaagcaaagaaataaagaacaaagaaatgatgcgaaataagaaagcacctgcaagcccataaaataaagctttttttctttcgttttctggcaaatggcgaacaatcattgccagcaccactgcgttgtcagcagctaaaatcccttctagagcaattaaaacaagcaaaacccaaccatattctaaaagaagcggcacatgtttccctcctaaaaaaccgttgctccctttagggttgccaacggctttttaactatgtacgcttctttcagctaaaagcaatgaactggcaagttattgcttttgccgctcgatgtttcgctccattatgacttcgtctgtgacaggacttttcaagctaaaaaaaagcaaactaatggctagccccagcacaagcacaatcccgatccgccttacaaaatcgataaaaccaaccatattggcctccttcaagtcgctaaaaaagagccactaagccggcaaatagcgccttcttatcgctcttttaaacattcgtcagtactatccatatggcttcatttccggttttattcctccctttgcaggcgttgctcgccaacatagaggacatcttgttcggctaactcgtgattagcactacgcgccattgtaaaaaagcagtccgacaagcggttaaaaaaaggcaacaacgcttgggacacattagcgacgctattgattttacgttctgctttgcgggcgtctgtacggcaacgatgcaatgcgcaagcaggttcagaccctcctggaagaataaacccggacagtggcggcaacttagccgtatgggcgtcaatgcaacgctccaacgcatcggtatgggcgctcgtgatcttccattccgcctctttcgcttgggccaaatcggcccctgcatcaaataattggtgtgataacacaatcagttcctctgttagttggctaaggccgtgctttttacagctgtatatcgcaaagccaagtgaactgttcaattcatcaactgcaccaattgcttcaacgcgtgcatctgttttttgcaagcgggctccgacaatgctcgtctcgccccgatctccccttttcgtataaatcttcattctaccttctccttaaggcctattttggacgtcttcgatttgcggacgtttgctcacttgacaccacgctttagacgcgtgtgaccaccgaaaattgtttccttccttttacaggctctttccattcatgaaaagctgttccgtaaatattttcaagagcaccccgtgtcaagatcgattgcgtttcaccttggcatatcacttttccgtttttcagtaacaacacatcatcacaatacaaacttgccagattaatgtcgtgtagaatgcacacaaccgtcaattgccgtgatgccagcagttttgttaaatgctccatgagcgcaacttggcgagccaagtccaaatggtttgtcggttcatcaagtagcaagctgtcaggctgttgcgctagcgcccgagcgagccagacacgttgtttttcgccgccgctcaaacttaacaacgaccgttcagccatgtcgcttatacctgtctcctccatcgctttccgaatgatgtcgtcgtctgtttttcctttaacagcaaacaagccttgttgatgggcgtagcggccaagggcgacggcttcatagacaggcacgtcaaaggaaacatgctcatcttgggatagcacagccatccgctgcgcccgctcttttggctttagtgtagctagtggctttccgtcaatttcaattgaacctgcctgataaggataaaaacctgtcaccgtttttaacaacgtcgttttgccactgccgtttgctccaagtatgccaagcattcgccctttctttgcttggaaacttacttgatcgaggattagacgccccccccggttaacggaaaggttatttgccgcaatcatgtcgcctggtccctccttttcgctcgctggcttctatatagcatccacgcaaaggttggggcaccaatgagcgcggttacaacgccaattggcagttctgcaggagaaacgacgacacgggctgccatgtcgcatactactaaaaaactgccgccaacgatggctgccaggggcagcaagtgtgaatagtcgcttccaaaaagcgttcggcacatatgggggacaacaagaccaacgaagccaattgtacccgagacggcaacggcacttcctgttaaaatcgtcgcggcaataaggatgatgtattttttctgtaccacataaacgcctaaatgctgcgccgtttcttctccatacataaaagcattcaactcattcctacaaaaaaacaacaatgtgaacccacccacaaaaaacggcagcaacaagccaatatgggcccaacctctcattgcaacgctgcccatcaaccaattgatgacttgccgtagttcatcttgcgacatggctatcattagcgaaaggcctgcccctagaaaagcactggcaatgatccctgcaagcacaacggtttcattttgcaaagatggggaaaggatctttgtgaaatacaagacagccactaacgtcaaaaagccacatcccattgcgacaagcggcaatgtccacgctccgaaaaaggccaattgaaagaatagcacggcgactgccccaagcgcagctccagaggaaacgcctaacgtataaggatctgcaagtggattccgcaacagcccttgaaaagcagcaccagctacagctaaacaggcgccaacgaaaagcgccaacagcactcgaggaaggcgaatgtgtaaaataatttgtacatgccctggatctaattcttgtccaagagggatgttcagcccttcttggacaaggacgaagaaaaccgttgggaatgaaaggccgacgctgccaaagcgaacagcagcaatcactacaaacagagtgatcgctatcgctccagcgtaaacggcgattttatgcgtttttaagaatcgttgcaatgtgcgctgcggtaacaaggtagcgttcctcctgccatttttcttcctaacggcaaatgcagcgccttgtcgattccgacaaacgctgcatccgtctgcattgcccacatccacttgagcaataccattgcttgcctctgtttaatcacagaatgtctcatttccctttatcgccttgctgtttaggcaacgtaaaatgaaatgttgtcccttctcctaagcggctatggacagtaattttcccttggtgtgcgtcaataatatgtttcgcaatagcaaggcccagccctgttccgccatgctgccttgtccgcgctttgtccgctttataaaaacgttcaaacacataaggaaggtcttcttcaggaatgcccctccctgtatcaactacagcaaatgtgtcacgttcttcttcttgttcatgtacaacggtaatcagtccaccagggtttgtatgcctgatcgcattatgaattaaattggttaaaacttgctcaatccggtcagggtcaaatacagcaatctgtcctcttcctggcttggccaattcgactgttacgtcatattcgcgggcaaagcttgcaaacttgcgggtaatccgttctaaataagaatcgagatccacttcttccagattcaagtcaatatagcctgcttccatacgtgccaaatcgagaagctcattgacgagcctgcccatacgtagcgattcatcgtaaatgatttgcgcgacttcttttcgttcctcatcacttgatgttaccccgtcaaccatggcttcgctatagccttgcaacattgagattggcgtcctgagctcatgcgacacgttggcaataaaatctttgcgcaatttgtcatgccggcgctcttccgttacatcacggacaacagctacagcaccacggacatgctcttcagcatagagaggcgccatcaacacagccatacttcgcccttgaacggacagttcttgcagctcttctttctccgctgaaacgacttgttcaaacaaaggtgttaacgatactggcaatgttttccgttcacccgttattggcttttgcccctcttcatagaagagcagcgctaacacttcctctgcttgggggttggtcaataagattctgccttgtcggtctagtgtaatcacgccgtcagccattgaggcgagaatatgggaaagctgttctttttcttgattcaactcggaaatgttgcgattgagctctcggcgcatccggttaaaggcaatcgctagctggccaatctcatcttgtgtaaggatcggcactttcgtatgaaactgcccttgtgccacttccaatgccgcttgccgcatttttcgcagcggtgccgtgatccgacttgacaaaaaaaacgcaaaaacagtcgtcaacactaacgcaatgcctgctgacaaatagataatccgtcgcgtttctgcagctgcttcctcgacggcagacagtggttggtataaaatgatgccgctgctcgttaaataatcttctgataacggcacaccgacaacgatcatttcaatcgggtcttgctcctgtccactggcaggataattggcctctgttacaatccgctcgcctttttcaagtccttctaccgaccactcttccagcaatgtcgcaacattgatctcgcctgaacggttgccttgggcactccacgcttttgcgccatttttaataatggtgatattaatttggaattcattgcttaacgattgcaagtaatcatatgtgcttgtttcatccgtatgggtttcatacatcgtttttgccatatttgcgtagctgtttaagcggctttcagcttcctcaatcgcatttccttctgtaaagcgaagcagcaggaccattagaattgtcaatacagctgtgacaagcaaaaggatggtaaaccataatttcccgactacactttgccacagcatcacccacgcgtcgcctcaaacttgtatccaaccccccaaacggttgaaataatggctgctacttctggagaaacgcgattcaatttttcgcgtaaccgtttgacatgtgtatcgactgttcgcaagtcgccaaaaaactcatagttccaaacatcctttaatagctgttcacgagaaaacactttatctggtgattgcgccaaataaaagagcagttcatattcttttggcgtcaaactaatttccgtcttgtcaacagtcactcgatgggcatcattgtcaatcgtgagtggcccaaacacgagcacatcttttgtctgtgtgtcagtttgcaaaaacttagtagcagatgcacggcgcaacaaagctttcacacggagcaccacttcccgggggctgaacggtttgacaatgtaatcgtcggctcctacttcaaacccttgcacacggtttgcttcttctcccttggccgtcaacatcattacaggcgtcgcttttttcttacggagctcttggcacatctcgacgccatccatcccaggcatcatcacatcaagcaaaatcaagtcatattctttggcaagggcgagttcaagtgcctcctcgccattgcttgcttcttcaatttggtactcttccctttctaaatacattcgcaataggcggcgaatccgctcttcatcatcaacaacaagcaatgttggcttgtattccatttgggaaacctccttatcgatactgctctccttagtagtgtaccacggaagaaattttagttgccattcgtacgactaaaaatgcggaattgttccagcaccggctgtaacaattccgccaaaattaagcgtaagaatgaaggcccgctatgaccaaattgacaaatacaaggttaaacataataatcgcaaaaccgataacgcataaccacgccgatttttcgccatgccagcctttgtttaagcgtaagtggagataaacagcataaaataaaaacgtaataagcgcccacacttctttcgggtcccatccccaaaaacgtgaccacgcaatttgcgcccaaatcatcgcaaacacaagtccgcctaaagcaaaaacaggaaaaccaattgcaatcgcgcggtggcttaactcatccgttgtttgcgggctaatatttttcaaaagcggctggattgcctttgtgagccgtttgcgcaaaatcaaccgcagcagccaataaagcaccaaaccagcaacaaatgaccaaagcaatgtattcaaatcactcgcttcgatattgcctggtactgaaacccatggctccatcgcgccctccgttaatagttcccattcattaggcccgacaatcgctggcaaattgtacaccatcggctgttctgaaacgacgccttcttcgttaacatattgaaattcgacttcatatcctgctgctgcaaacccatgggaaaggctcgaataggcaagaaaacaaagaatactgtacatgatgacttccagtgctcgtggcttccaacttttcgtcgtcaagtcgattgtgcggatcaaataagcaagccctgcagcaaagccgatcgctaataacccttgtccaatcgaagttgttataatgtgaagctttagcatgagcggcatttgcaatgacggcacaagtggagaaatcgccgtttcaaatgttgacgcgtaaacaatcaacaacattacagtcggcatcgcaaaaaagccaatcacatctgccttgctcggataaataaaataaaggatgacaaaagccaagctcattgcaattccgagaaaagtcatatactcaaacatattgctgacaggcggatggcctgctacataccagcgcgttataaaatagcctaaagctagaagcaagcctaaagaggcaaacacgaaccctcgcctgctttcttttgatgctgttttgcttgattcggtttcttttttccgttttcgaagggagaacgcaaaaaataccgttgctattaaataagcaaaaaaagcaaacagcagtaaattaaagctaagattgaccataacgtccccctatttctattatgctccttctgggcggctctccgcttcatcctcttgatcgacaggaggtataagcgcattgccttccaatgcatcgtcaatttcccttttaaaagacagccagttccggtttgtatggccagcaatccaaacttcccctccaacttgttgcagccacacacgcctgtgagcccagtacgacccttgaatgagcccaataataaagatcgaccctccagcaattaaaagtggcatcgtcaagtcttttcggaccgttaaaatgctgacattgactaaatcgacatcaacaaatgtcattttatattcattttcccctaacggttctaaattttgttgaataccgaccatgcttgtttcaccatctggggtatcaggtgtatacatggtaaaaataaagaacggattattcggcacacttgaacgtgtagatggttcatcattactattcatataaaaatcagggaaatattcatcaagcaccacggaatacccgtcgccaaggtcataagatttctcaggattaagcaaatgaacggttaattcgccaaatgtatcgccagtgtctttatgttccaatgtaaacgtcatttcatgcaactcatttaagcggtaatccgtttgataaagggaaaatgaatcaaatttgagcggatcgttgacacgaatttgcttttcttgcacctgttcaagctcgccgctctctccgacaattcctgattcttgccgtttataaagaacggcatcggtttcaaacgtctccggaacgactgcattgcttgatgcaaacgcatcttggaagcgctcatcattttcgtcgtatagctctaccgtaaagccacggttttcgataaaataaccttctgtttctggtatagggctttgttctccttcacggacccacatttgcgtatctacatacatgcccggaatgtagcgaagcaaacaaccgatcagaaacaaaattaagcctagatggttaacgtacgggccccaacgggcaaagcggtttttttccgcaagtacattcccattctcgacgcgaatgcggtagcgtttacgttttaacctttctgccgcttcagaaatcgctcgctccgcttctgaaggcacgatttctgtctttgaaaataaacgctgccgagtcataaaatgcttatggcgcgttacccgttgcgactttaacgctttatacaagggtacgccacggtcaatgctggcaacaataatagagatgccaagtgcggcaattaaagcaatataccaccacgaactatacagttcatgcaagcccaaattgtaataaagcagtcctaagctgccatactcttgttcataaaatactgctgggtcttcgccaattaaattttcttgcggcaagatcgtcccgactcccgaggcaagcagcagcaaaacaataatccatacgccgactttcacggaagaaaagaaaccccaaatccgatcgagtaccgttactttccgcttttttgagcggatcgctgccccctcgtagcgcatgttcacgccttctgtgcgcgctttttccgtcagaggcttcccacatgcagcgcacatctcggtgccttctctgtttttatgtccgcactcacatacgtgcgtctgttcgttcatgacaaatccccccagatgcccttatgcgtcaggaacaatgctttggaaaaattcgtggaccatttcctctgtcattgcgcctgtatgtactttttgcacaatgccgtgctcgtccactaaaattgtagctggaagcgggccgattccatacgcccgtgttacttcccggcgctcatcaatggcgactggaaaagtaaggccatggcgattgataaatgactggaccgttaggggcgcctcatcaacattgacggcaatcatttcaacttcgtctttgtattgctcatatgcattttcaatgtaaggcatttcccgctcgcacggctcacagaacgtgccccaaaagttaatgaatacacctttgccttgattttggccaagctcaaaccgctcctgttccagatcgactaacgcaaagttggtcgccggttctccgactttaactgctccctgttcagaggcggcattcgcataaatcgtgtagccaattgcacacacgattgcaaataacaccgtaaaacggataatgctccttttctttttgcttttacccaagcgacgtcccctcctctcgcgaaaatgtgaacgttttcttacattatagcgctttcttcgttttgtccgcctgcaattttatgacggtttcgtgacagccagttcctttaattgtttgacttcaatcggctttaacggccttgattcgcctggatgtaaatggccaagcgttaaaaacccgtagcgctcgcgctttaactttacaacaggatggccaattgcttcaaacatccggcggacttggcggtttttgccttcatggataatgagccgcacaattgctgtttgctttttcttgtcaatcgacaggacttttgctttcgccggggcagtcttgccatcttctaagacaatcccggtttcaagttctttgatccgttttcgttcagggattcctttcactttggcaatgtactctttttcaattttataacggggatgcatgagcagatgggcaaactctccatcatttgtaagcagaagcaaaccagatgtgtcataatccaaccggccaatcggataaattctttgttcgctttcaataaaatctgtgacgactttccgccctttctcgtcatttgatgttgacacgacgccagtcggtttatacaacaaatggtagacaggctcttctttatcaaggggaacgccgtccacttcaacagcgtctttgcttggatttacttttgttcctaattctgtaaccgtttcgccgtttactttcactctaccttcaacaatatattcttctgcttttcttctcgaagccactcctgctttggcgataactttttgcaatcgttccatcgtgttcacctctttgccatcataccgccttcaagcagctgatacaagtaggcgaaagtagagatttaatcagactcgaaaaatcaaacaaatgacataacatttccccaatagaaaaaaacgcgtccagcttttgccagccacgctcttttgcttgtcatgtatttctcctcgcttacccaaagacgaggctaacgacgacaacagcagcaatcatgccgactaagtcagcaagtagtccgactttgagggcatcgcccattttcttgatgccgactgcaccaaaatataccgttaaaatatagaacgttgtatctgtgcttccttgcagcgtagcagctaagcggccaatgtaagagtcgggaccatggacagcagttagatcagtcattaacccaagagcacctgttccagaaattggacgcattagcgcgagcggcacaatatcggcaggaatgccgacccagcttagtaccggggccatggcgccgacaagagcctccatcgcccctgaagcgcgaaacacataaatcgcgacgagcatcccgactaaataagggataatcgaaacagccatgctaaacccttcttttgcacccgatacaaacgtttcatacgtcggcacgcgcttaaacgaagccaccacgacgacaaaaccgatgagcaacgggatgagccacacggaaagcgatgttaaataggtcatttctttttacgctcctttcgcgcccggcgcatataaaaaaggcggtcaatgcaaatcgcccctagcatggcgcagccagaagctaaaatcgtcgtgctgacaatatctgtaggcgccgcagaaccgtacgacatacgaatggaaatgaccgttgtcggcacgagcgttaagcatgctgtgtttaacgcaagcaacgtgaccatagaacggctcgcctcttctttgccgccatttagccgtttcaactcctccatcgccttgatgcccatcggtgttgccgcattgccaagaccaaacacattagcggtcatgtttgacaatatataacccattgctgggtgatcttttggcacttctggaaaaagacgccttgcaaggggatggaccattttcgccaatgccttgagaagcccggccgcttctgcgactttcatcagcccaagccagaatgtcagtacgctaatcaagccgatgcatatcgttaccgcttctttcgccccggtgaagacgctctctgtcacctctgccattgtcccgttcacacctgcatagataagaccgatcaatagcataccggcccaaatcacgttaatcataaaggccgcaccccaatgatgaatgttagcaaccgcccaatcttttgaaacaaagacacgtgctcctcttcttgagcctgataataaagagggattgattcaattgttttgccatcaaccgtaaacgctaactttccaattggttcaagcagctcctggtcagtaaactttcctcttttcgggggattcttcagcgttaaagcagactgcaactgacttttctcttctctcgttagcggatacacaacatcatacgggacatacaaattgccttcgtaaaatggatcgactttgcttttcagtttcccttttgacacgagccgttcaaggctgtaatgctcaaagccccagttaaacatatgcatatggtcgtcccagtcatcaggggcatttaacgtaacggcaattaaatcaagcccgtctttggaagcggtagacacaagcgttcgttttgctaatttcgtataacctgttttcccgccggttgagtaactgtacttctcggtaaggaggcggtttttattatgaaatacacggactttatcgccttttgaacggtagtcttttgtcgatgaaatatctcggtattcttcgttccccatcgcatattgcgttaaaagcgccatgtcgtacgcactcgacaagtggtcctcatctgtatcaagtccgtgtggattgcgaaatagcgtattagacatgccaatttcctctgccttttcgttcattaaaaatacaaagccttcgacgctgccgccaacatgttcagcaatcgctatagctgcgtcgttgccgctccgtagcataagcccatacaccaagtcgcggagcgttaatttttcaccagccactaaatacagggaggaaccttctgttccctcagcacgtttagatacggttactgtctcgtctagcttgcctgattcaatcgctaagatggccgtcattatctttgtaatactggcgattttcaaaggctgatgttcatttttgctatacagaacacggccagaagactgttccatcaaaatagcggcctgtccagaaacaggaaatgttgcaggttcattcgcaagcacctcgctactctggaaaaaaaacaagaacccgaccaataaacagtgaacgattgtttttttcatcataccctccagcctccactccgtttagtaccactttatgcgaacaagctatgaatatgacgggcttgttcgaattcaaccacgaccaaaaaccttttcacctgttttgaacggcgaaaaggtttttattcttacatacaaacagtttagccttttggtttaaaacaaagggaagccaaaaatccaaagatgatcgcagcagagataccggcgctcgtcacttcaaaaatgccggtaataattccaatcaagccgacgcgatttgcttccattaacgccccttgtacaagggaatttccgaaacttgtgataggtacagtcacgcctgcgccagcaaaatcaattaacggttcatataaaccaaagccgcttaaaatcgcccctgatacgacgagcgtcgacatcgtatgggctggtgtcagcttgccgacatccataagcagttggccaatgacgcaaatgacaccgccaactaaaaaggcccacaaaaaaatcatgacatccctccgttcgcttcaatcgacaccgcatgagcgatacaaggaatcgactctttttgctgataagacaaaggagaaagcaatgcgcccgttgccacaacgagcaaccgttttaactcccctttttgcatttttttcaaaagatgcccgtacgtgacgacagcagaacagcctggcccgcttgcgccagccataacaggctggtcttctttatagagcattaagccacaatcctgaaacttgctgtggtcaaggtcatacccttgttgctttaataagtcacggcagatcggcaagccgatttggccaaggtcgcccgatacaattaaatcatagtcatcgggtttgctgttcgtgtcgcgaaaatgggcggcaatcgtgtcagcagcagcaggcgccatcgctcctcccatatcataagggtcggataagcccatatcgacaatgcgaccaattgttgcttttgtaacgactggccctgtgcctgttttttcaagcaggcacgccccggcggctgttgctgtccattgcgcggtaggcggtttctggctcccatactcagtcgggtagcggaattgcttttcagtcgctgtgttatggcttgaagcgacgctaataatatgcctggctccgttcgcttccataatcatcgcaccgatcgctagcccttccatcgatgttgaacaagcaccaaacatgcctaaatacggaatgccaatggtacggccggcaaaactggaaggcgtaagctgattaaccaaatcgccagcaagcataaagttgacgtcttctttttttagggacgcttttttcaacgtttctgttaccgcgccttcaatcagaacagtctgcgctttttcataagaatcttcgccgatccataaatcgtcatgcaataaatcaaacgcttctggaatggcgccatttgcttcaaacgggccccccacagttcctgtcgccgttatgactggtttgctgtcaaaaatccaactctgtttgcctgcgagcattaaagcacccccactttcattaaaatcgttttaatgagcgcaataaagaaagcggccacagtgccaaaaacaataaccgaaccagctaatttgaacatgttgccaccgacgccgagcacatacccttccgtccgatgctcaattgcagccgatgcaatcgagttcgcaaaaccagtcactggcactgctgtcccagcccctgcaatttgcgcaatccgatcataaaagccaaggcctgtcattaacgtcgacaaaaaaatcaatacggcgactgtcgggtttccggccgttttttcggtaaaattaaaattcgtataaaaaaaaacgtgcaaacattgtccaattaaacaaataaaaccgccaataaaaaaggcgtaaatacagtttttaagtacaggccgctttttctcataagaactatgcagtttctggtattcttgttgctgcggcgtaagctgtttttttgccatatgtgccctatcctttcgaatgcttttcaatgacattgatcgttttttctagctctttttcacttaaattgccagctttcactttgttttcagcgtcctctaattctttgtagattttcttatctgtggaaatgtggatcgtataatctggatataatgctttgatccggtcaaatgctttttttcgtacgtcttttaattgaaagcgatccacttgcttgacatgcatcgccatgaccatttcttctttatactgtatgcctctgacgctgatcacttcttccatcgccagaatctcgtccttcgccctatccgaagcttcttggccatggcctgcggcttcctggagtttgaaggcgctgcctcgttcatcttcagcttgagtacaagctcctaaacagaggagaacagcaagtatcgaaaccaattttcttttcatgtttagtttcacctccacctacaaatcatatctagacacacacttaggttgttttagttagaaatcgtttaaacatgaaatttttgtaaatttttcgcttgcctatttagcactacatcattatctgcatttgctgcactctaatatacgaacagatcttgaaattgggggatggtagacgatggacgggtatctgtttctcacaaccgagctcattgttggcttctttgctctgctgttgctaacaaaagttcttggcaaaaaccaaattacacaattaacaccgtttgactttatttcggcactcgttatcggcgaattagtcggcaatgccatctatgataaagatattggcctccagtatgtgctctatgccattttcgtatggggctcacttatttattgtattgaaatcatcacgcaaaaatttcgtttcactcggggtttccttgaaggcacgccagcgattgtgattgctaaaggccgaattcaatatgaggaactccgcaaaaataaacttgatttgaaccagctccaacatcttttgcgtgaaaaaagtgtgttctcagtccgtcaagtcgaatacggcattttagaaacaaacggtacagtaaacgtccaactcaaaccgctttacgcacagccaactaaccgtgacctttccctaaacccaaaaaacttgccaatgccaatcctgttaattatggatggggaaatcatcaaaaaagctttaaaggaaattggtcaagatgaaacctggcttaaagatcaattaaaagagcggggcatcctatcatataaagacgtcctgtatgctgaatggattgatggcgaaccacttttcttgcaaacatacagagccgagtaaaagcaacaattgcttaataaaaacaattgttatgttttgataaacgaacatgaaacatcgtgcttgcttttgtcgtaaaacaaggaaacacatattatatattgattgtgtttgccaactgcttttgtatacaatgaacctacaacattaaattgcattaggagggtgaaaaaatggcaatgaaagatcttttaaacaatatgtattccttaggtgtaggcgctgctgccgcgagcaaagaacaaattgaaaaaacagtcaatgatttagtgcaacgcggtgaagtcaaacggtctgaatcgaaccaacttatcgatgacttgctggcaaaggggcaaaaggcgcaggaaaatatggaaaacatgattcaagagcggacgaaacaattcttatcgtctctagatgtgccgacaaaggaagaggtcgacgcccttaaagcgcgtgtcgctgccctcgaaaaagcccttagcgagaaggacgcagaaaagtaacagaacgaactaggactggaaaggacgaaacctatgttaaaaacgcgcattcgctacctttctaggtaccaagatattattacagccctttatcactatggctttggccaaattgtccgtgatttagggctgctagatcgcactaaaaaacgaaccaaaaaaaaacgtgcccaagactcttcgctttcggtcgccaagcggattcgcctgcttttagaagagcttggccctactttcattaaacttggacaacttgcgagtacacggggcgacctctttcctgcttatgtgctaaccgaactggagaaccttcaagacaatgtaccgagctttgcctatcaagaggtgaaagacatcattgaagtagaactggaagccccccttgagaagttattccgttcctttgagccagtcccgttggcagcagcatcgattggacaagtccatcgggctgaactgcctactggcgaaaaggtcgtcgtgaaagtacggcgcccaggaatcgagcgcacgattgaaacggaccttgccattttgcaagatttgctagagttagccgaagagcggatcggttgggttaaacgcttccgtctcgtcgatttgttccacgagtttgccgaagcgctaaaagaagaaatcaattataaaaatgaggcgcaaaacgcagaacggattaggcggcaaaactcggaaacacaacatctttttacaccggttgtctactcgtctcattcaacgatgaaggtgttgacgatgacctatgtggatggcacgaaaattaccgatgctacatacgacaaaggctttaaccaagagattgtggctgaacggtttgccactgggatgtttgagcaaatctttgtgcatggcttttttcatggcgatccacaccctggcaatgtctttgtcacgaaagagaacgagatcattttgattgattttggcatggtaggccgcttgacaactgatatgcgtcaaaatttagcattgcttgtccttggtttaaaaggccgcaataccgaccgcgtcatggaagctcttttccgcatggatattgttcacgaccacgtcgaccgtgaccgcctctgggatgaccttgaccatttgcggttaaaatattacgacatcccaatggctgacatttctcttgccgaagctgttcaagacttgttcaacgtcgccaataaacatgattgcattgtccctgtcgatttgacaatgctcggaaaagccctattatcagtggaagccattgtctcgtcacttgctccgacattgcgcattattgatattgtggaaccgtttgggcgtgtcttgattaaagagcgctatgatccacgcaactttgctaaaaaagttcaagccgaatttcaagaagggatggaaacattgcgctatttcccacgagatatgcgcaacacgttaaaagatatccgcggcggaaaattaaaagtcaatatctcgattcgtgaaatccaccatctgattcaaaaagtggaccgaattagcaataagcttgctttttcgatcgtgctcctttcatttagcattattatggctggagtcattatcggtggctccttaacggcagagccaaccatcttattgcaaatccctgctattgaaatagggcttgtaattacctcactaatgtttttttggattatctgggcaatttttaggtcggggcgtttttagatcgtaagagaaagtggcagtgatacttatgatgattgaatctgcaattgcaataccaacatatttgcttgtcgccctcatgatcgtcaatatcttgcttgccgccattttaatttttattgaacggaaagatgcacaggcgacttgggcatggctgcttattctgttttttattccactaggcggctttattatttacattttcctcgggcaaacattaacacggaggaaaatgtttgaatgggaaggaataaaaaaagtaggactcgagcatttcattgaagaacaaaagcgtgaccttttagacacttcgttccgcttttatagccctactgttgataaaaatcgcgaattgatctatatgcatctaatgagcaacgacgcgctgctaacaaaagagaaccgtgtcgatattttcagcgacggcaaagaaaaatttgcgcaattgttaaaggacatcaaacaagccgagacgttcatccacatccagtattatattttccgttacgatgagatcggaaaaacgatcgtggatgcgctgacagaaaaagcgcgccaaggcgtaaaagtccgcttgctctatgatgacctcggttcccggtctttgcgcaaaaagtatttaaaagcgtttcgtgaagcaggcggagaaatcgggatttttttcccatctaggtttacgattgttaacttgcgtttgaacttccgcaaccaccgtaaactcgttaacatagatggcaaatgcggttatgtcggcggctttaacgttggagatgagtatttaggaaaaagcaaaaaatttggctactggcgcgatacccatttgcgtatcgtcgggcctgctgtccaagcgattcaaacacgctttatcttagattggaaccaggcttccaaacaataccatatttcctaccatgatcgttattttccagaagtgcagcctgctggcgatacgcctgtacaaattgtctcaagcggaccagactcggaatttgaacaaatcaaaaatggctatttaaaaatgatcatggatgcgcgaaagtcgattttaatccagacgccttactttattcccgaccaaacgttgcttgatgcccttcgtgtcgctgcacaaacaggcatagaagtaaaactgatgattccaaacaaaccggaccatatgtttgtttactgggcaaccacttcccatattggcgaaatgctaagagctggcgcaacggtctatcagtatgaaaatggctttattcataataaagtgttgatcgtcgatgaaacggtttgttctgtcggtaccgctaacattgatcaacggagctttaagctcaattttgaagtgaatgcctttatttatgacagtcaaatcgctggccagctaatagcggactttgagaatgatgtaaaacactctactcaaattacgccagaaatgtatgaaaacaggccaataagcgtccgctttaaagagtcaatttcacggctgttgtcgccgattttataaacaaaaacaaatctaggtccctcctaggtttgtttttttaatagggcacccattttaactgcgaggcctggcggtaacgattttcagcttccttccagttcacaacattccaccatgcctcaatatacgctttacgctcattttgatactttaaatagtaggcgtgctcccatacatccaacaccaacagcggcacttggtcttgttgggaaaggttttggtgcttttccgcctgaagaatttctaaccggtgggacctcggcgcgtaaatgagcatcgcccagccgccgccttcgactttttcagcagcattggaaaaatgggctttcattttttgaaaggagccaaagtcttctgttattcttgcttttagcagcccttgcggctctccgcccccatttggtgacatgacatgccaaaaaagcgtgtgcaaataatgacccgccccattgaacgccgcttccctctcccaatgcttaatcaaatcataatttccagtacgtctcgccttttccatttctttctctgctttatttaaatcattgacatacgtctgatgatgctttaaatgatgaaggcgcatggtctttgcatcaatgtacggttccaacgcattatatgaataaggcattggtggtagcctatgaccgccgatggggacgctgttatttttcccttttcctcttaaatcggccattactacccatgagtcataggcgtgttgagcatgttcgtttgcttgtgtaggatcgtgttcaagcgcatattccaattggcttaacgactttgtaaaaggctgtgtttgctcttctcctatggacctgacaaactcgctttcctgctctttccaaagcctggcaagctcatctttccattttcttaatgcttgctcatgcgaatccacattattccctcctttttccttttctccctacgtatatgcaactgttcttggccaattgcgaaaaaagtataaatttgaagggaaacgctttctttatctcgaaactacgtataaaccacataaaaggaggaatttctcatggcttatcaaccatctagtacggaagacgcactttccatggcttatcaacaacctaatacggaaggggcacttgtccattttaaggagcgctacgacaatttcattggaggcgaatgggttgctcctgtcaacgggcgctatttcgaaaaccgcagccctgtgacagggaagccattttgtgaagtagcccgttccagtgccgaagacgttgaattagcccttgatgctgcccataatgcgaaggccagctggggaaaaatgcctgcagcccaacgggccaatttgctaaataaagtggccgatcggatcgaagaaaacctggaaatgcttgcggtagccgaaacatgggataacggaaagccgattcgagaaacattaaacgccgatattcctctcgctgtcgaccattttcgctattttgctggcgtgatacgtgcccaagaggggacgcttagccaaattgatgaaaatacagttgcttatcatttccaagaaccacttggtgttgttggtcaaatcattccttggaactttccgattctaatggccgtatggaagctagcgcctgcactggcggctggtaattgcgtcgtccttaagccggccgaacaaacgcctgcatcaatttttgttctgctggagctcctttctgatctgctgcctccaggggtcgttaatgtggtaagcggctttggcctcgaagcaggcaaaccacttgcatcttcaccaagaatcgcaaaaatcgcctttactggagaaacgacaacgggccggttaattatggagtacgcatctgcaaacttgattcctgtcacgcttgaattaggtgggaaatcaccgaacatctttttcagagatgttatggagaaagaggatgactttttagataaagcgattgaagggtttgtgttgtttgcgttaaaccaaggtgaagtgtgcacatgcccatctcgagcgctcattgacgaaacgatttatgatgcgtttatcgaaaaggcgctccaacgtgttgctgccatcaagcaaggcaatccactggacccggaaacgatgatgggcgcccaagcatctgaagaacagctggaaaagatcttgtcctacctagctattggcaaagaagaaggggcagaagttcttgcaggcggcaatcaaaggcagttaagcggggattacagcggcggctattatgtagagcctaccgttttcaaaggaacaaacaatatgcggatattccaagaggagatctttggtcctgttgtttccgttgcgacatttaaagatgcagatgaagcacttcgaattgctaatgattccctttacggtcttggtgcaggcgtatggacacgcaacatcaacaccgcttaccgctttggacgtcagatcgaagccggccgtgtctgggtgaattgttatcatgcttatccagcacatgctgcgtttggcggttataaaaaatcaggtgtaggccgtgaaacacatttgatgatgcttaaccattaccagcaaacgaaaaacatgcttgtcagctataatgacgactcgcaaggattcttttaattaatgttcgcggctgttaaaaccgataagccccagccagaggcacatgcctttggctggggctcgttttcacggggcgatcgttcgtgctagtgtggaacaagtgattaaacaggccacatctcccgagggtttagttcatacttcccgtcttcccggaacataaaatgggacatgacccattcgcgtcggacggtggcataatcatcgtaaaactgttgaatatgattgttaatgtcctcttccgtataaactttcccagtccgcagtccctttgtcatgtattcaagcataatcagtttctttttccgctgtgcaggcaatgttttcagcctgccatttgccagcaaaaaatttccgatgactttttgtttgacttcctcatctacttcgattgctccaaacatgtcttcactaccaagcaacacaatcgcttgcgccatttgcattaatttcttttcatgcaaatagaaataaatcgtgtttttatcacgcctttggtaaattaaatcaatgtcgcgcagtttggcaatgtgatgagaaatggttggcggttttaagccaagtttttctgcgatcgcctgcccgtgaagaggcccatcttttaacaaagcaatgatgcgcaaacgagttttgtctccaagcgttttgtgaaaattgacaagccggtttaattgcatcgcgcaaactccttcattgctgttttacaagtcagcgttcaacttttcaaagaacaaatccgtttcatcctgttcttcttcatttaaatcaagctcttttaagtcaggcaagtccgctaacgactctaaaccaaaatggtctaaaaaatacggcgtcgtgccatagaggattgcccggcctgtcccagacgcccgaccgcactcttcaattaacagttttgatacaagtgattgcaacgctttctccgacttgactccccgtacttcgtcaatttcagcccgtgtgattggttgtttgtaagcaacaatcgctaacgtttcaagggctgcacgggaaagaccgccgtgtatcggcgatgaagccagctttttatacatatcagcatgttctacttttgttgtcagccgataccggttggcaagacgcgctaaccgaatgccgcgctcctcttttgccatttgttctgaaagcacttcaagcaattgaatgacttcgtcttcactaatttcaaccagttcggccatttctgttggcgaaatgccatcatcacctgtgacaaacagcaaaccttcgatttttgcgagcttacttgcttgcatgctcatccccatcccataagtaaatcataatttcagcaaagctctcctcttgcacacaatggatcgcccgtgttttaatgagctcaagcatggccaaaaacgtgacaatcaactgagacacattgccagtctcgtacagcgtatggaacggagccttgcctgaatgggccgatagctcgtccaacagttcgttcatacgaagttcaattgactgttcttcactctggaccgttttcgtttttggtgcattccatgcattgcgctggagaagcttttgaaacgcgccaagcatatcagcaagtgtgacgccttcgatttggagcttccgttcttcttctgcgcttaaaaaagcgtccaaatcgtttggaggcctcgtatggactaagctgcgctgtgcttctttttcttttaattgttcagccgcttctttaaaagcccgatattccaaaagctgctcaacgagttcatcccgagggtcttctgcttccatcccctcgtcttcgtaaaacaactcctcgggctttggcaaaagcatttgacttttaatttgcaagagcgtggccgccatgactaaatattcgcttgctaagtcaagctcaagttcttgcattgtatggatatagtgtaaatattggtctgtaatttttgctacaggaatatcataaatgtccacttccgcctgcgcgatcaaatggagcaacaaatcgaggggcccttcaaaagaatctgtttttacgttataagttgttgtgttcactcaatcaccacattagatttggacatcttaaatcaacatcgaaaacaacggtcctctgcttttgtggccaatccgtttctagccactaaaagtcgactcacgctagaagtataccataaaccacttttttgcaacagcaaaggggaacaaacgatgtacaaacagcgctatcttgatttcctctattattttcatgctaaacgggattacttcgaatgccacgaagtgttagaagcggaatggaaatccgttccgaaagacaagcgcgcttcttattgggttacgcttatccaattagcggtcgctctttatcatgagcgaagaggcaatataaaaggagctgcaattttgtatcgccgcttactcaaacgcgttcctgctgaggcaaacgccctttacgaactaggcataaatgcacgtgcgctaaaacaagatatgaaagcacggctggcccatttaggctctagctgttttgaggactacaaccttccgctctgggacacagccttacttgccgcatgtcaacgccacgctgggaaatcgtggtgtgctccaagcaatctcgctgatgcccaacttattcataagcacattttacgcaatcgaaatggccaataaggaagtaaaacagcagaaaaaaacggccccttcagggccgtttgagttgtcgacaaaatcactcagactgatagaaaatgctagctgttattcctcaaactgctttgctagattcgccatttcaatcgccgcgcttgctgcttcccatcctttgtttcctgcttttgtgcctgctcgttcaacagcttgttcgattgtatccgttgttaagacaccaaaaatgacgggaatcccagttgttaatgccaatgaagagacgcctttcgccacttcattacaaacgtagtcaaaatgaggcgtcgaccctcgtatgacagtccctaaagtgatgaccgcatcgtatcggccgctttcagccatttttttggctgcaaacgggatctcgaacgctcctggaacccaagccacatcgatatcgccttcatctgctccatggcggattaacccatcttgagcgccgccgagaagtttgcttgtaataaattcattgaaacgacccacaacaattccaacctttaatccagatgccaccaaatggccttcataatttttccccatttaaagccctcctataaattgagcatatgcccaagtttttctcttttcgtatgcaaataacgttcattttcggctacagcttccatttgcagtggcacacgctcaacaatgtttaaatcatagccttctagccctgcaatttttcgagggttattcgtcaaaagccgcatgtcacggatgcctaaatcacgtaggatttgcgccccaatcccgtattcgcgcaaatccgctggaaacccaaggcgctcattcgcttccactgtatcgtagccttcttcttgcagcttataggcgcggaatttattgattagcccaatcccacggccttcctgcttcatatagagcagtacgcctcgtccttcagcttcaatttgctttagcgctgcgtgcaattgtggaccacaatcgcatcgtttagagccaaatacatcaccagtcagacattcggaatgaacgcggactagaacaggctcaccatttccaacgtcccctttaacaagggcgacactttctttgccgtcgatggtattcgtatagccaactgctttaaagtcgccatactcagtcggcaacgaaatagccacttctctcgtcacaactttctccgttttacggcggtaagcgatcaaatctttaatcgtcaccagtggcagggtgtgctgatcggcaatgatgcgcaactcaggcactctagccatcgatccgtcttcgttcatcacttcgcaaataacgcctgccggttttgctccacaaagttttgcaaaatcaacagcggcttcggtatggccagcccggcgcagcacaccgccgtttttggcaacaagcggaaaaacatgccctggccgtttaaaatcacttggctgcgcattggcatctgctaaagcgcggaccgtttctgcccgctcaaaagcagagatgcctgttgtcgtatgtgaatggtcgacgctgacagtaaatgccgttccatgtgggtctgtgctgtgagacaccatctgcccaagctgcaggcgctcagcctgttcttccgtcaaaggcacacaaatgagaccgcgtccgtgcgttgccataaaattgattgtttcaggggacgctgtttcagcaagagccaaaaaatccccttcattctcccggtcttcatcatctacaacgaggatcattccccccgcttttaattgtgtgatcgcttcatcaatcgattcaaacacgttgttctcccctttacatatagctattttctttaagaagctgcgacaaaggcgtacgaacggcactttctttcggggcaagaagtttctcaacgtatttgccgataatgtcgcattccaaattaacatggtcaccaggtttctttgtgcccataatcgtcatctcaagcgtgtgcggaataattgaaatcgtaaagcttgtatcagtaacggcaaacaccgtcaaacttgttccatcaacagcaatcgaccctttttgaacgatatagcgaacaagttctcggtctgcttccacttcgaatagcacagcattctcaactggttgtcttttttgaatcgtgccaacgccatcgacatggccagaaatgatatgcccaccaaagcggctgccgacagccatcgcccgttccaaattaacaaattgccctggaacaagctgtttaatcgttgtcgcttcgtatgtctctggcatcacgtccgcttgaaattggctttcagatattgccgtaaccgttaaacaaactccattcacagcgatgctgtcgccaattgcggcgtccgccaaaacggttttgcaattaacagccaatgtcatcgctttgcctttttttgacacagaagcaactttgcccatttcttcgatgatacctgtaaacatagtcatgcccccttttaaatagaaaaaaccctgaagaacacgccttcagggtacaggaaagaaacgtatggtttcatacgtttttgcgcacaacaaataaagcaaacataaccgtttttttaaacgtttgcgctcgaacttctcccatccagactattactgtcggctctggatttgcaccagatccaccgcacgcacgagtaatgcttatgcgggtcacggactaaaaggcgattgccttatcaccgccggtcgggatttacaccctgccccgaagttgagtattatttcacttgtaattggttcatcaagtaaaccaagattatcattggaaaataaaaaaagcaaggactttgcttccttgcttaacgttcataacgtcgacctgctgatcgattgatcttgtcgttgacattagagctcgtattaaataaagttcgaacaacgcaaaaaagcaaagcacttggtcatcaacgccattctccgtgctttgcctgcttataagcttctgtattctatcttcttgttccgttagaagagacaaaaagctagactctatggaattttttgctcacaagacaacgaaagcccttcctctcgatcgtccttgcggctccgaggccgcgccagtttgaattgcatgtacaaaaagtcttttccctgcgcctgaaagggggcggcgtaagtagtaatagacgggaggcatcaactcccgcaggcagaaaaaagtagcctagccttatataaatagttattataacgaaaaagacaccacaatgcaagttgaaatgttttgcatttccgctaaaaatgcgtcaaaatagaaaaagaagcgattactttttaatgatgaggtgaagcaatgtcgaccaatatgcgatttgaaaaatcagatactggggtaggagtcatcacacttgcccgtgaaaaagcgttgaattcactgtcttatgacatggtgagtggcatgttggcacaattgcaacaatggaaacaggatgatgaggttgcgctcgttcttcttgaaggggcggggagcaaagctttttgtgctggcggagatattaaagcgctttatagcgcccgggacagcaaaaacggcctggaggaagccaaacatttttttgcccatgaatacgaacttgatctgctcgttgccacctatccgaaaccgattgtcgcccttcttgacggcattgtgatgggcggaggcgttggccttagttacggtgcaagtcaccgcattgtcacagatacaacgaagtggtctatgcctgaaatgaacattagcttctttcccgatgtaggggcctgttattttctaagccttgctcctgggtacacagggcgctatgcagcgttgactgctgcaatgctaactggagaagatgcgattttcctagggtgcgccgactattacacgaaaaaagaaacgatggaacctcttcgcagtcaattgctaaacaccgactggaccaatagcgaacaagatctgaatcaagcactgcacctttttttacagtcgttcattgcagaaccgccaaaaagcgaattggcgatgctgcaaccgaaaatcgaccaacatttttcccataaaacggttgaagcgattatcgcttcacttgaagaagcaaaaggggatccatttgcccaagattgcgccaccatattgcgcagcaaatcgcctttatcattaaaagtgacacttgcccacttaaaacaatcaaagacgtctactcttgaagaaacgtatgaaaccgataagcgtctcgctttgcgctttttacgttccgatgatttttatgaaggcgttcggtctgtattaatcgataaaacgcgcatgcccaattatcaatataaaacaatcgaagaggtacctgatgaattagcgctttcctttttccgtgaactgtgaagtcgcttccatcactcagactgatagaaaatgcttctctgatgccgtacagttagctatgttttttaacttggcacaggctgttccaacacatttgagaagcaacgaacgatttgcctacagtctgagccacctgccttttgcgggtggctctaaaagtagacactggtttttaagcgataacaacgttccctttattaattgaaccagcgttcggtaacgacttttttccttgtataaaattggatgccgtcacgtccattcgtgccaagatcgccaaaaaacgatgctttattaccggcaaatgaaaagaatgccattggagcaggcacattcacattgatgccaaccatcccggcatcgattgcatttcgaaagtgttgtgccgccttgccgcttgatgtgtaaataacggccccgttcgcaaagcgagatcggttcgttaaagcaattgcctcttctaaatctcgcacacggacaatgctgagcactggggcaaacaattcttcttgccagatcgtcatctctggtgtcacgtggtcgaacaaagttgcgccaaggtaatagcccgcttcctcactcgttgcgttgcgtccgtcaaccaacagttctgccccttgctctactccttgttcaatgtatttaacaactttgtctttatggctttggcgaatgagcgggccgacaaaatgttcatcgtttttgccgttgccgactgtcaatttcttcgtctctgccgttagtttttcaataaaggcatccgctacttcttcaacgacggcgaccacggaacaagccatacaccgttcgccactcgatgcaaaggcggcgccgatgaccccttggaccgtcttatctagttcacaatcagctaaaacgacagcgtggttttttgcgcctgcaagggcctgaactcgtttgccatttgctgtacctgtttcatatacatagcgagccactggctcagagccgacaaacgaaatcgcttcaacgtcagggtggtttaacaagccattaaccactgctttgccgccattcactaaattcaacacacctctaggcaaaccgacttcatgcataagcgagacaagttgttcagctaaaagcggtgtccgttcagaggttttaagaacaaatgtattccctgctgcaatcgcaagtggaaacatccataacgggaccatcattggaaaattaaacggcgtaatgccagcaacaacccctaaaggatagcgccaaatcgaaccgtcaatcccgctggcaatatcgggaagagcgtcgcccatcatcattgtcggtgtcgacgtagctagctccacacactcaatgccacgttggacttcccctctagcatctttgatcgtcttgccgttttctagcgtaatcagctgcgccaattgctccctatttttctttagttgctccaaatacgcaaacatgtaccgagtacgctcgggaacaggaactgttttccatgtttcataggcacgctttgcgctcgccaccgcctgctccacatcacgttcgcctgaaagcggcacgtaagcaatagcttctcccgtcgccgggtttggtacgacttccgtatcagccgtagatgcttcgacccaagcgccgtcaatccagtttttcaccgttttcactttcgtagttgtcatcgtttagccactccttccgctttaaaggaaattgtctgttccccaatccgttcaaacagcacggccatgtccttttctccaagtcctgctcgctcagcgtcggcatacagttcaactaaagcttcactaatcggcaatttcacgccacgctcttttgcaagatccatcgcaaaacgcaaatctttattaagcaactttaaagcgaatccaggttcataattgcctgttgccataaacgacttgtagtttcgctcataaatgcggctctggccataactaacatttaggacattaaacaaaaaatccaagtttaagtcgctctttttggcaagtgccaatgcttctgcgacaccggccgtataaaagccaatcaacaaattattaatcaactttgcattgatgccgctgtcataactttcactaatatgaaagacatggcttcctagtgtcattaaatgatcggatactgactcaagcagtttttttggaccgcccaccatgaacgtcaaggtacggttttccgctccaacgacaccgccactaacaggagcagccaaaaacgataaccctttttcttctgccgcttgcccaatccgcattacaagctctggggcgactgtgctcgtgtcgacaaatagaatgcttgaaggggcagaagcgaatacacccttctctcctaaatacacattttcaaccgcttccgaagaagggaggcttgtaaagatgagctcgcttgccagcacgatgtctgccaaatcacgggcccgctttcccccagcctgttcaaacgctaaaagcgaagtttcattgatgtcataaccaactacttcatatccagactcaagcaaatttttcgacattggcatgcccatattgcctaaaccgatgaacccgactttcacgacatctccccctctggtgattttgtcgactttagcataagctcaagagcctgccaagcaggctctcacatttatagacaaacgctcgcatcgattcgttcatatactttgaaacgatcatttctgtaagcacacccgtgttatttgtatttaacagacaagcgttttctaccaacccgtatgactttgcaacgtattactggtcgcttgttaaaatcgttttggcgacagacgcatccaacgcttcaaattcatcatatgaaatggtttcgtataattcgctgcgcttttgcatgtcagccaaactcgctttttgcgtaccattctccataatatcagtaaacacacgttcatatgctttggccgctacgcgaagcgatgtgacgggataaatgaccatcgcaaaccccatctgttcaaattcctctgctttgtaataaggcgttttgccaaactccgtcatattcgcaagcaaaggcgcttcgactgcttcggcaaaggcacggaactcttcttcaccttgcaacgcttctgggaaaatgccatcagcgccggcatcgagataaagcttggcgcggtcaattgctgactgaagcccttccacgccccttgcatcggtccgggcaatgatgacaagcgacggagccgcttttttcaaagcagcaattttttgcgccatctcttcagcctgaatcagtttttttccgttcaaatggccacattttttcggcaagtcttggtcttccatctgtacagccgcaaccccagcttcaaccatttccacccctgttcgagcaacgttcatcacaccgccaaatccagtatcgatatcgactaaaagcggcagttttgtagcccggactatttcccgggctcggacagccacttcgtttgaatagacaattccaagatcaggcaatcctaaactcgccgtataagcagctcctgacaaataaaggctagtaaagcccgtttgttttgcgattaagccagccatagcatcatgtgcacctggaatttgtaagattcccttttccgtcatctgtttgtaaaaagacgttgctagttcttgttgtgagcgcggttcgtctacaatccaaggcattgcaatccctcctctctttctataaggcaagcaagtctgtaaaagctggtactgacatgttgcctaagtctttgtttgtacaagcctcaaggattgctttttcttgtttttgcggataatggctagcgatatttgctgcgaatttctcctgaatagcaggaacagcttcttcgcggcggaaacgatggccaagtggatattcgattgttacttggtccgttttcgtaccgtccttaaaaaagacttgcacagcattggcaatcgaccgtttttctggatctaagtagtctattgaaaactgtttgttttccgtaaccaccatcaaatcgcgaagttggtccacacggggatcttgggccatctcatcttcatagtcatctgcgacaattgcaccctttaacaggccaattgctgtaatgtattgcaaacaatgatcccgatcagcaggattgtacagcggcccttttttgtcaatgatgcggatcgccgattcatgggtatggatttcaatacggtcgatctcatccagacggtcacggactgactcatgtaacgtgactgccgcttcagctgccgtttgcgcgtggaattcagctggataagacactttaaataacacattttccatgacatatgagtccagcttacgggcgagcacgacttccttcttattaaaaagcacgtcttggaaaccccatccaggagcagacagcgccgttttatagcccatctcgcctgttaaagctgtcattgccaaaaagacgcctcggcttgtcgcgtcgccagccgcccatgatttccgcgagcctgtgttcggagcgtggcggtatgtgcgcaacgaggaattgtcaatccaggcatgggaaacggcgtttacgacttcttcttttgtaccaccaagcatcccggcaaccacagcggtagtcgctactttaacgaggagcacatggtcgaggccaactcggttaaagctgttttctaatgcaagcacgccttggatttcatgggcttttaccatcgcgattaacacatcatggatcgttagaggcgctttgccttctgctatgttttttctgcttatatagtcggccgtcgctaaaatgccgccaaggttatccgatgggtgcccccactcagcagcaagccacgtatcgttgtaatcaagccaccgtatcatcgtaccaatattaaaagcgccccgaatcgggtctaaaacatgggatgtgccaggaactttaaccccatttggaacaatcgtccccggcacaaccgggccgagcattttcacgcattccggatagcggagggccagaatgccgcagccaatcgtatcaacaaggacgtgcgccgcggtttccagcgcctcctcgcttgtaatgtccttttttagcacatactcagcaatttcctctaaaagcaagtctgtttttcttgtatccgttttcaagtccatgcaaaaaacctccgttgtcccttcatttctgtacagatgtataacgtggccctgtatacttaacccgaggcctaaatagcttgttgtttcgatgttgctcgattacgtgggcacttagcccggctgtccgggacgaaaagaaaatcggggtatacaagctgattgggatgcctaacatccagtataccggggcagcataatagtctaaattaggataaagccccttctctttagccataagagcctctcccgcctcgcacatttgcaggagtctgtcatctccagcagcttgtgaaagttcagcaagcgcttctttcataataagagcccgagggtcgatttttttcatatacactcggtggccaaatcccattattttctcttttttctttaacttattcgatagaagcgtttcaaactcttcaggtgagtttgcatcaaggagcatatacataactgcttcattggcgccgccgtgcaaatgccctttcaaagaagcgactgcccccgttaaggcgccgtacatatctgaaagcgtggaggcaatgactcgcgctgcaaaagtggagttaggcatttcatgctcagaatagagcaacagcgattggtcgaacacacgctcttctaattcacttggcacatttcctgtaatcatgtataagaaattggcgctataggaaagagaatcttttggcgttaacacttgtttcttctcaaggatgcggtagctgttagcaacaaccgccggcagcttggccagtaattcataggctcgttcacggtttgcctcttcactgcggtcatctagccgtgtatcaaaaccccctagcacagaaacgcctgtccgcagtgcatccattgggtgtgtcgatgcaggtagccgttttaaaacgtccaaaacagcttcaggcaagtcatacgaaccgcttaaacgttctgctaatgctagccgttcttgttccgacggcaattcaccctttaacaataagtggacaatatccaaatagccatttgtttttgataattgaatcaagtcgtaaccgtggatgatgatttgtccttgttccgtgtcgagaaaagataaatcggtttctgccgcaatcactccgtccaatcctggatgatacgtttgttcaacttgcatgcgatccctcctttttctttttccgagtaaaacgataagtctaattaaataaagcgcttacataattcgacgaaactcacctccaactgccgtctacgacttcgatgtgttcatccgtctacttaaatgtaacatactctaaattcactcggcaataatcatttactttttgctgcgattctggaaacaaccttctacccacaaagattgttgttcgctcatggcacgcgtttctctttttctattaggaagtatgcacacctgtttcaaaaaaggaagggattaacatccaaggagtatcgtaagatgtatgtttaggcgggtccgattaactgctctgaaaaagataggcacagcggtcgatcccagtttcatatccttatatttcctgtttagaatctttatacaaaagaaaattgtagtcgtttacactaatttcatcttttgagatgaggaggttaagatacttcttatcagtcggcatgacgggcaaaatcgggggtataacacaggcaaactcttttctgcggtctacggtggctgtttgaatggcgtttttaggcaaagagatttccagccctccatagagacggccgttcggtcgggcatggggatagcgcaataccaacgggtttttcgttcgataaaggtcgccaggcacctttgcttttcccatgacccgatatgaccgtatccagttcccaatgaccgaaggtctctcgttttcggatctcttctctgcttgatggatgtccagacggtgaagcgcccacggttttcatagggtttctgattttaccgatgctccagcaaaggaatggggaatactcttattttgtttatttcactcactcctaataatatccatactttatttaattatacttctctatccctcgctgctctgccagcaataaatttaccatatcactatagctattcaaaccgtctgactgattattcgccttcagatataagtcatttacatttcttgaaatacttgaaataacaccctcatacttatcccggtattgctcattttgttctatatcatgctgcaccgccttggacagactggacattatatcagacgccttatctggatcaaccttttttagctcagatatagaataatcaaatgctagaaaaaaaccactataaagcatcattggatcgtcctgctgcttacatgctagataggctataaaatttgcctcatcctcatgcatgaaaccactctgatgtgccaattcatgtgccatagtagcaggcgccaagaaaactggcacattaacattgatattggattcaaaagtaaaagggacaaaaataccatgtatccctgcatgcgacattagttttgacatcacaactggttttggtgttgaatataaagaatgctccaaaatgggatatttctttgataacatttgcatcgagaacactgcttgttgtgcatagtaatcaaaaacctctggtacttgaaccaaaagatcagtatccgctaacttttcccttgccaattccatttcaacggcaagcgacttactcaatttgaccagttcctccttgctgtagttttcttctttattatattcggtataagacaaaaaagaatatctgtgatagtttattccacccaaaatagtataacaaaaatatatcacgctacagatcgtaactattcctaaagtaccacgataaactaccatcctacgtacacctttactcatgataaccttgcgcacataataaactatataaaatagcaaaaggaacactaccaacactacgagccattcactaacagaaaatttgacccaagaaggtacaaatcctactgtttttgacaataacggatatacagacttactgtatttttccgcccaatcctgatggttctgcgcgtattttgtcagtatataagctataactccaagtgagatccacggcaatcttttaagtaaaagcttttttatatttaacacaatgatccctccaataggagtttgttttcattaatatatctgtgatagaagttttcgtataatgttccgcgctaccaatatataaccattcacatacttagtttcgtctagtaaaattctctgctccgtcccttctattcttatgatttcaataattaattttctccataacttcgaaactgccttaattgctttaatagcatctttaccaagttcaaagaaacgggcttctattccaaagccggtgatattcctaatatttcttcaaatactatagataaacaacttttgtaccaatcgccgtagcgcgaccgccacctcgctcctgtttttcgatttatccaatccccttattattgcattcatggcattccacacttccattgttgctgcaaaacgcctgtttttgtaaactaatgaaaaaagcaatgatacccattgcttggaaaagagatggttggatgcgactcgaagaggacttattgattgcaacgctaagcgatgaagggaccattcgtggtgcttcccgcaagttatacatatcccagcccgctctcagccagcggcttaagcaaattgaacaacgctttggggagccgctgtttatccgcacccataaatcactgattccaacgccagtcggggaagaagtgattgcctttgccaaacgccgtgttcaggaggaaaaacaactacaagatcgtcttagcaagttgacaggaaccgtacgcggtacgctttcactagggatctcatctgtcattgcccaatacgtattgccaaagccattgcgtgcctatgtaaacgcttatcccgatgtcaaaattgatttgcacaccggccttagttctgctatttatcaaaacaggcatcatacgcatctttcgattatccgcggcgatgtcgatgataaagaagggcttacgctgctattttctgaacggctttactatgtccgccgcgccgataccgaaaaaccaactgtgttcatttcttttcaaagcgacgatgcctttcaatcgctcattgaagaatggctgtatgcggaggctgcccactcgcccttacaaacgatcaccgttgaccaaattgaaacatgcaaacaattaatggcaaacggcattggcgctgccattcttccagaggttgctgtccgcgacttgaacggaaacgactatatacgtatgccattggacgtaaacggcaaggaaacgatgcgtagcacttggcttcattgcccagaaagccaccgttcccttccacaagtaagtgcgtttttaatgtttttacaagaggcgctgccgccatctcctcttaaaacaacgtctaattagaaatagaacggtcgtggcgtgaagtaaagccctgtcatcacgacagggctttctgctgtacacttattcttcccaaactttcacttctagcatcacatcgccttgtttaatgcggtacacactgtctagtccttcaacaacttgcccgaacactgtgtggacaccatcaagatggggttgaggctcatggacgataaagaattggctgccacctgtgtctcggccggcgtgtgccattgaaagcgcgcctgggacgtgtttatgtgggttgccttctgtctcgcattttatcgtatagcctggaccacctgttccatttccattcgggtctcccccttgggccacaaatccagggatgacacggtggaatgtaagaccattataaaaccctttattggccagtgtttcgaaattttctaccgtaccaggcgcggcgtcctcataaaattcgatgacaatcttttcaccgttttcaaattcaatgcttccttttttcatccaaaaaccctcactctcaactatgaagtagcggcaagcgcttgttccattgtacacaaatctccagtaattctcaaacgtcactcgtttcttttacgttcgcttgataagcaagatcgagcttggttaaatcctcataactctcccgttgaatcactagttgatctgccccgtcttctgcaaacactacagccgggcgcggaatacggttgtaattatttgccattgagtatccatacgcaccagtacagaacatcgccaggacgtcgccatgctgcacctctggcagaggcatatcccaaacaagcatatcgccgctttcacaacattttccggctacagaaaatgtttcttctgctttgtcatgggcgcggttggcaagcaacccttcgtatttcgcatcgtacaaagctgggcgcaagttatcgctcattcccccatctacagatagatagcgccggacattgggaatatctttcgttgacccaattgtatacagcgttgtagctgcatctccgacaagggaacgcccaggctcaatccaaatttctgggatcgctaaccctaaacggtcagcatgtttttttgtttcctttacaatttctcgaatgtacgtttcaggctctagcggcttgtctccctctacgtaacgaatgccgaagccacctccgaaattgagcacacgcgggacaaaatcgaattcttcttgccaagcttgaagctggttaaagactttttcaattgcaagcacaaaaccttctgtttcaaaaatttgcgaaccgatatggctatggacgccaagcaaatcaatgaatttgctgcgttcagcaatctgcgcggccttgtccgcctgtccgctagcaatgtcaaatccgaactttgagtcttcttgccctgttgcgataaattcatgggtatgggcttcaacccctggagttaaacggagcaaaactgaaactgtttgctccatgtttgcggcgagttcctcaagcaattctagctcgtaaaaattgtccgcgacgatacagccgattcctgctttaatggccatttctaattctccatggcttttgttgttgccgtggaaatggatctttcctggctcgacgcctgcttttagggcagtatacagctcgccacctgaaacaacgtcaatgcttaagtcaagcgaggcggctagttggtacatggcaatgcagctaaaagccttgctcgcataggccacttgataggaaaccccttctgcctcaaatgcttgtttaaaagcgcgggctcgttcttttatgagggctgtgtcataaacaaacaagggcgtatcgtatttttttgctaaatccactgtatcgacgccgccaatttccaaatggccagcttcgttaatcgtcattgtcccgtgtaaatacatggctccactcccttgtatccctttaaaaaaagcaacttcggccaaaaaggctaagctgctttttcgcgtttttccattagtgtatcaaatccatgttcgtttggctactcgcttgttggcgtttgcctaattttgtcttgtggatggacaatgcttggcctccacctgagtgttggcacagaagccctgcacaatacttggtataatgccggcgggtcaaacggcaaaaatggccataagtaagggcgctgcaaaggggcaaggcgcacaagtgagaaaaacagcagtgtcattgcgacgacgaagcccattccgtccaaaaagatgactgataaaattaagccgtagcgtgctatccgaagcgctacaccgagctcatagcttggggtggcaaacatgccgattgcaccaagcgaaacatagagaatcacttctgacgtaaaataaccaacttcaatcgcgatttcgccaatcagcaaagcggcgactagccctagtgcagtcgctaatggcgaaggcgtatggatagcggccatccgcaacaattcaatgccagcttcggcaaaaataacttgcagtgcaattggaatgtttttattttcattgacgccgataaaatcaagagcggggggcaccatttcttgattgatggcgagaagcaaccaaaacggcacaattaaaagggaaaacaaaatgccgattagacgcatccagcgcaggaacgtccccactgctggagcctgcctgtattcttccgcatgctgaacgtggtgaaaaatcgtcgccggcgttatgaccacagacggcgatgtgtcgacaatgatgacgacatgcccttctaaaatatgggtagcggctacatcaggccgttcagtataacgcactaaaggaaaagggttaagcccttgtttgacaatgtattcctcgacgactttgtctgccattgtcaagccgtcgatgttgatcgcttttaattcttttttaatgattttaataaagcctgggtcgacaattccatctatataacaaaggcaaatatcggttttggagcggacgccaacttgcatgatttcttgccgaagccgctcgtcccgaatgcggcgcctggtcaaccccgtgttaaagataatattttccgtatagccatcccgtgcaccgcggacaacacgctctgtatccggctcttcggggccccttcctggataggaacggacatcggccacaagtgcttttgcctcgccgtcaacaatgacgaagattaaccctgagagcacttgcgtaatggcgtggtccattgactccgtttcttccacttggatatgggccaaatgatttttaatcgtgacaaacggttgttcgacgcggcgtaacctgccttcaacttccatgagctcgcgtaaaatttcaatgatatataaattgtcgacaagacctgtcaaataataaatgccgacttctctattaaaaatatttagcttgcgaacgccaacatcaaaggattgatcaaggccgagccgttgctttaatatcgcttcattctcagaaaagtcatggctaaagttcatcggtttcctcggggacttcacggtatccactcctttctaaaatcatttctagcgcttgcctcgtcacaggcgctccgcgtttgacatcatcaaagcgtgccatcttgccaatatcgccgatgccgactatataaggaatttgcagttcatcaagaatagaaacggtatcgccataaatacgcccgatttccaggtcaggcaccccttctttatcgaccccgtacccagtcaattcacctgttcggtcaacagacacatcgacatgggcccactcttttgcatgtgtttttgaagcaaccgctactgccccgatgatatcgatctggtcgtggctcgcaagatagcgcatcgcttcttctcccgggccattatcacgccagccacaatcatcaaacatcactaaaattggtacgtcgggggcagacaagatcaacgtagcaagctgttcgcccgctaacgtcgaaggattgccagatgaagcgctaatgcatcggcaaccaagctctgccgagaggaactcaaggacttttttagctgctaaatcgccgtctgtcacaaaaataactttcctcttcatcctgtcgaacccctaggcttgaaaaacaaggccgctgccacgctaaacaagatcgaaaacacaatcgtggttgaggcaatttcaaacactccgtctgtaatcttaaacaaaccctttgccccttcttccatcgccccatgaacaagtgaataaccaaacccggttaaaggcacggtagcgcctgctccagcaagctcaaccaaatgctcgtacaaatgaaagccgtcaaggacgattcctactattgccatcacgacgagcatttgaacaggggtcagctttgcggcgtcaagcaaaacctgaccgattaaacaaatggctccaccgactaaaaacgcccataaaaactccatttgctaactcctcctttccaggacaattgcatgggcaattgctgggatcgattgcttttgcaaaacggtcatcgagcttaaaagggccccagtggcaacgacaaggacacgttttagttccccagcgagaaggcgatggtaaatatgcccatatacaacagatgcggaacaacctgcgccactccccccggctagtacttgttgctcagagtggtacatcataacaccacaatcctcatagcgcccggttatataaatgccttgctctcgcaatagtttacggtaaatttcacttccagatatcgctaaatcacctgtcacaattaaatcaaagtcacttacttgctgattcgttttgtgcaaatgaccgattgtcacctctgctgcagctggtgccatcgctgcccctaaactcatcggatcagtgatgcccaggtcttggacacggccaatcgttgcttccgttaattgaatttccgtgcgcttcttccccagtagaacagcgcctgctccagttacagttgtctgagccgtttctggtttttggactgcaaattcagtcggatagcggaattgcttttcacaggcgccgtaatggctgcttgccgctgcgagcaccaaatcagctaacccgctagacacccatacgccgctaatgattagcgtttcaacagaggtggcgcatgctgaatatgtaccgatgtatggcaattgcaaatcacgggcgacaaaactagaagcagtcgtctggttgcttaaatctccggcaacaaacaaatcaacagagtctatcgataaatggtttttggttaaacattgtttaatcgcttgtttcatcaatgcacgttctgccatttcccaacttttttcatcacaataaatatccgtgtatcggtaatcaaaagagccagccagcggccctgctccttcttttgggccgactgccgtgccgctcgattggatatacactggatttgagaatgtcattgtccgatgtgaaaggcccatagtttccctcttttctagtgtaaaatcatgcggatcaacagtctggaaaaactgacgaggtaggcagtactgatgccgaaaacaagcaccgggccaataagccgaaataaattggagcctacgcccgttaataacccttctgtccgatgttcaagggctgtagcagccatggcattggcgaaccctgtaatcgggacaagtagtcctgcgccgaacagttgtgcccctttgcgataaaagcccatgcctgttgctaaaacggcaatggcaatcaacgtgataagcatatagctcgttgccgtttcatcggataattggaacaaagcatgataccctcggaaaattagttgaccgattacacaaatgagcccacctgaaaaaaaagccagagacccatgttttagatagcggcttttcggtttatacaagacaatattctctttgtactcttcttgtttattcgcattcacaatggatggctccttcattcgctctcctgttagtatgtatcgaatcaacctattcatgcgtagaaacaaaaaaagccacatgctttcacgatttgacagcatgtgatatgacagtatataaaataaactattcgaaacatttagtgttgacaatgattttagtcaacggtatacttgcggtaacatcttcgctctgcttcctcaggtgggtcttcctcaaacatttttcctccagcctttttcttactgttcaaagcttgccacctggattgtctgtaccatacttacacattcctctacataggcccctagacaaaaaagaaagcaagctcctaaacttctgagcttgcttttttaagtggcgtctgacattgtttctttcatttgttccaatatttttttctctagccgagaaacttgcacttgcgaaatgcctaggcgttcagccacttctgattgtgtttgatccttataataacgcaagtatactatcagccgctccctttcgccaaggtcgcaaatggcttcttttaaagcaatcttgtcaaaccacttgacttgtgagtggtcggcaatttgatctagcagtgtaatcgggtcgccatcattttcatagaccgtttcatggattgaagacaagctccggttggcatctccagcaaatacaatttcctcaggcgtcacgcctaaatgttcggcaatctcattaatggtcggcgcccggcgcagcgttttcgtcagctcgtcttttgctttgcgaattttattgcttaattctttaatggaccggcttactttcaccgtaccatcatcccgcaaaaaacgttggatttccccaataatcattggcacagcatacgtggagaatttcacatcataggaaaggtcaaatttgtcgacagacttaatcaaaccaatgcagccaatttgaaaaaggtcgtctgcctcataaccgcgattcaaaaaacgttggacgactgaccagacgagacgtgtgttatggttgacgatcgaatcccgtgcttctgtgtcgccttcctggctttttgcaatcagctctttcacttgtttatcggatagtggcttttttttgccgccgtttttcacctctgcactcataagcaagaccccttatctgcacattgctttcgtcgtggtcagctgttttttcacgtaaacggttgtcccaatcattggttcggagattactttcaactcttggcaaaaattttccataatcgtgaagcccattccagagcgctctagttccggtttcgaggtataaagcggctgtcttgcttcatccaagtctgatatgcctaccccttcgtcgcggataatgagttcgagttcacgatccttcagttcagctgtaatataaacttgcccatttggatcattttcgtagccatggataatcgcattggtgaccgcctctgagacaatcgtcttgatttccgtcaattcctccatcgtcggatcgagttgggcaataaaggcactgactgtcactcgggcaaaagattcattttcacttaaagccgaaaacgctaaattcattttattggccactttatgccacccccaatttttgcaatgcgaatcgttcgctttcttccaaccggataattttaaaaaggcccgacatctcaaacaaccgctcaatcgttggcgaaatcgcgcatacgaccatttcgccgccatttgccttaatttgcttatacctgcccagtataacgccaagccccgaactgtccataaaagacagctcagccaaattcaacacaatatgctggatgttttctagccgtgcttctatttggctgcgcaattctttggcagaatgatggtccaattccccttcaagccgaaccaacaacacatgctccttttgctccaatccgattttcaagttcacaaactgcacctccgtcgttttgctagtaattcattcgcctgcaaaatgacagattccttgtacatgacaaaactagtggcaaagtttgcttttcctttgtgattagctattttccagcaaatgatgacaacatccgtttaaacagcgtccaccacgaagcgttttctacatcttcagctgccacaaggtctgttcttgaaagtgtttcgccatctcttacaataattagctggccaactgcatccccttttgtgacaggtgcttccacgttttcaaatagctcgattttcgtctcaatttcctcaagcttcgtgccttttttcaacaacaatgaaacgggctcaggcgtgatggcttgtacatgcctatccttgccttttataaccgggacttccccaataaggtctcctcgctcatgcaaccgctccgttgaatagtggctatatgaatagtcaagcatgttcgttattgtagcattgcgctctttcggcgttttcgcccccataacgacggcaataacacgcatcccgttcttctctgctgtggctgtcaacccatactttgcctcttgtgtaaacccagttttcaagccgtcgactccagggtaaaacttgacgagcttattcgtgtttacgagccaaaactccttatcggtaccttttcgtaaataatcttcgtatatccctgtatacgaagtgatgttttcatatttaagcaactctttcgccataacagctaaatcatgtgcagaagagtaatggtccgcttcaggcaagccattcggattttgaaactgtgtattttccaaaccaagctctgccgcttttgcattcatcatttttacaaactcttgttctgtgccgccaatatgttcagccatcgctaccgctgcatcattcccagaagcaatggcaatggctttcaataagtcatccacactcatttcttccccaggttctaaaaagacttgcgatccgcccatggaagcagcgttctcgctaacggtcaccatatcctcatacttaatcgtgccttcttcaattgcttccataataagcagcatggtcatgattttcgtcatgctagccgggggaagcatgttgtcgctgtctttttcaaacaatacttcgcctgtatcccgttcgattaatatcgcggacgcggcattttcagctaactgaggcagttccttttcttttgcaaaggctgcttcaccagcgtatgcaaacaacaaaacaaacaggagcatcgatacgttccattttcttttcatgtttttccctccactaggccgtcatcataaaaaaactatttgctagtgtctccatttactggaaaggttatacatttgcccaaacaatatttaaaacgctgactccgttcccgtttttgccgaaccatcttgaaaaggaacaaaaaagcaagtcaagccattggcttaacttgcttcgggcaaatgcaacagctcggggaccgttacaaatgtatagcctttttctttcaaccattcaatttctgccggcagatcatcaaacagttggtagcttgtagccgtgccgtcatgatgaaggatgattccaccagaatgggcatcgtcgactacattcatcgcaatcgaaaatggcagttggtattgccaatctaaggaatcaatgctccaaccaattaggtggtaactttttcttgtgagtgttttgacaaccatgtcattcacgctcccatagggggccctcaccaaatgggtagtgacgccagttgcttcttcaatgaccgcttgtgtctgttccacttcgtctagcacctcgctttgttcaagcttggtcaactcttgatgggtaaagctgtgattgccgatgctatgcccttctgccaccattcgttttaagagcgacggatgttgctttgctttataacctagtacaaaaaaagtggctttgatattttcttcctttaataaatcaagtagacgttctgtgtaaacgggatcagggccatcgtcaaatgttaacgcgagccttttttcgtcatttggcccttgaaattgaattttttcacgttcgatctgtgtaagggcagtcgtttgcacaagcgctgggccatccctttcaatcgcttgataagaaagggcatcgctaaatcttccgccaaaaagaagtgaactaacgccaagaaacagaacaacggttagccatttcttgttcacgtgaaaaacccctctcaactagtcgatcttcctagtatgagaggagaataaatcatttatgcacaggcgattaaacaaacccccagtaaaaccatcccattgcgattgttaaggcagcaagcacaacggtctcaagccagcttccagtacgaatccgagcaatgcggacacggatgttggcggggtaaaaaaaacgaattccccgtactgttaaagcatcgagcaaataatgagaagcgatccctattaacacgcctgtttgcacagcctcgttgtccggaaacagccagcgcaagacaatgcttgctagcagcaggaacagcaaactatgggtaaatgtgcgatggccaaaaatagtcgcaatcgttttcgacaataccgggaatcttctgccgattttagaatgggtgtggcatatatcaggcaagatggcaccgacaagcccagctgcatagtaggcccacccatgggctcctgcaaaaacgattgtgtccatcgcttggcatgctactacgccgccaatcatatgggtttttcctgtcatcattgactcctttatgtattggttgcatcaagtgctcctccatcataacacacatacgttcgcttatcacgctcatttacataattcgtgacgcaacccgacgattgtactaaactaatcgtaggaaactcttcaggagggatcatgttgccttacataatcagtctactcacagccattcttcttactagttttgcttactttcttggcgatttcttcttggagcaagctctagcaatctggcatccccttttcattggagctagtgttgtcgtgttaggagcagtggttgaaaagctccgttcgccgatgtggctcattatcgtcactccgtttcccgtcggcatgacgctgctatttttgttcttaagaagcacatggccggtgtggttgctcacctatgtgttgacactggctttttatatcatcatccatatgatagcaagctcccttttccgtttccattcccttattccagcttggaagctctcgaaaaccgcataataaaaagagagggcttgtctcttgttacaaagccctctcccattccttggcatccattggaactgtataattcagaattccttttcaatcatggggcgacgcgtcgatctaccgcctcgactgatcccccttttccatcaatctggtgtgcacactaaaatgtttgaattccctgttgttcatggttttcatcaaaaatcattaactggcttggccggttggcttcagccaacttcatgcctgcttcaattgcttttgattgcttgtcaaactcttcataaggagcgacgtcttctatttttaataaccatgtagtcgcgtccttatttggaacaactgtatactttttcacccttaccggctcctttctccctttcaactatggctgtcgtgtatagtgaaccatacccgggaaccaaccccattaaacgttaaacagccgcaggcttcttaatgaagaaagatagtagtaagccgataaaacttaacacggtcgctacgataaaggcgttgttgactccttggatcattgcttcattggtgtgaagcgatgcggatgccgtcataatcgttacaagaatagctgtaccgattgagccagttacttgccgcatcgtattattcatcgctgttccatgtggaataagctcgcgtggcagtacgttaagtcctgcggttgttaccggcatcatcactaacgaaagcccgagcatgcgaactgcataaacgactgttaaataaactagacttgttgactcgcttaaattcgtatataaaagtgatgtgacaacaagtagggcgatgcctatgatggacaaagaccttgccccaatccgatcaaaaatacggccagtaatcggcgacattaaccccattaaaacagcaccagggagaatcgtcagtcctgtttctaaggcggaatggccttgcatattttgaataaagagtggcaaaatcgttgccgggcccacaagcgagacaaaaacgagcatgccgattccagtcgtcaatgtaaacagcgggtatttaaagacacggaactccagtataggatgttctaacaaaagctgcctcttgataaacatcacgagtgcacaaatgccgattgcaagtggaataaatacaagtggactcgtccaactagcttgcccagcatttgaaaaaccgaataacagaccgccaaatccaagcgttgataggataatcgataaaagatcaagttttggcgaacgcaattctgtcacattgcggatgacaaaaatggcggcaatgatatcaacgacaacgacaggaatcaaaatccagaataagatcgtccatggaaacatttcgactagccagccagacaatgttggaccaatagctggggcaaaggaaatgacaagtccaaccatccccattgctgctccgcgtttttcaactgggaaaattaataaaaagaccgtttgcataagtggcatcataatgcctgctcctgctgcttgaatgacacggccacccataagaacagcaaaggaaggagcaagagcgcaaatgagcgtaccgatgccgaaaagcgacattgctgttaaaaacaagaaacgggttctgaatttttcaattaaaaaagcgctaataggaatcataatgccattaacaagcatgaaaatcgtcgtcacccattgagctttgttttcattaatttgcaaatcaaccattaagtgtggcaatgcagttgtcagcaatgtttgatttaaaatggcgataaatgcgcctactagcataaccgccacaagcggctttttattaaacgttgactcttctgtttgtgtagactccattttttacccttctttatcattcaatttaaaacgtcggtaataaacattgttttactgaggacgaacgaaatggacgtgcgaggggaactgcttttatgtaatggcatatttggacggcagacagctttttacccattgattatagcgacgattttcttcgtttgtcaaaacatttgtttcgcctcacgaatttttacacattaaaaaccctgctccatgggtagtgaagcagggttttgttttttataccgcagattcatttacttctctgacgatttcgtgtgcttttaacttagccaaattcttttttaagatggccacgtccgccgtcgaacattgtttgacaaacgctgtcgtttggtctggtgagccaacaacatgaatcgtttgccaatttcgctttctagcttgtttctcgattttattggcaatctttttaaaccagcgttgctggttggcatcaaatcgatttgcgtacgactcgcgatgaagggcagcccccgtctcgccttcagggcgtgcgccaatatattctttccaatcttctgcttctacatcccaagcataatgcaattcatcgtttacttcccctaaacttgtctcaactgctaagacatctgttttctggatcatcacaatgccagaaagagggtattttgcttctaagttctcaagttgatcgactacagggtagtgctcccacctaaaatcattttctaccgggacttgtagcttcttcacatacaggtcaccgcttgcagaaccgataaaaacgatgcttttcggcaggttaggcgataattctttaatgtttttttcggcaagctttttcagtctcttaaaacttttgagttccgcatcattctcactagcttccaggtattcttccagtttttttagcccatttttcaaacggatcttccactcacctttttgctgatccgtactggacaaggacgtgcgcaagtaaattgaaagacagccgtcatcgcaatggatttgtttgaaccgctcgatatcttttgctagtgacaatgggtcaccctccttttattctgctttcgcagtcagcttcacttggatgttaccacgtgttgcttttgaataagggcaaaactcatgtgctttttcgacaagttcctgtgcttcttcctccgatacgcctttgactacgacttcaagttcagcgcctatttgaaaccctccgtcagacgggtctttaacgagagagatatgggcggttgtggtcgagtcaatttcttttttcgctttctctgccattaaattcaatgcgccgtcaaaacaggaagcatacccagccgcaaacaactgctctggatttgagccttcctttttcgaacctggtttgacaaggtctaaatcaatggttgcatcatctgattttacatgcccttcacgtccgccttgtgctgttgcggatgatgtgtaaacaatgtctgccacctatatgcaccccttttcatctgctttatgaatggtatacacgtttatgctgtcatttaaacatcaaattttgctaaacctcattatttatagcagtgaaaggcgcctctttaggtgttagttaatctattcgctgcgggtatgcttcatgacaaaatgaggaacattttagcgaactattggccgtagatttctttataaataagcgttggttgttccaccttctcatcgacaatgtgataagcctgttctacaagctttcttgcttcctctatcccttgttcgttggcaaaaagggttgcaagcgtttccccttcctctacgtaatcgcctgttttcttttcaagcacaaggccgacagctaaatcaatttggtcttctttggttgcccttcctgcgccaagctgcatggcggctgtgccaattttatcggctgcaatttctttaatatagcctgctttttgagctgagacagcgatttgctcggatgcttgaggcatttgtgctggattttctacgaccgatgggtcaccgccttgtgaagcgataaatgctttcagcttctccaacgcgtcaccgttttgaatcgcctcttcaagaagttgccgcgccgcttgaacagactctgctcgtttagccaaataaaccatatggctgcctaatacaagacaaagctcccggacatcagctgggccttcgcctttcaaaacagcaaaagcttctttcacttctagcgcattgccgactgcccttcctaaaggttggctcatgtcggaaatgactgccatcgtctcacggccaacgctcgaaccaatttccaccatggcttcggcaagctcaacggcatggtccaacgtcttcataaaagcgcccgatccgcatttcacgtctagtacaatcgcatcagcacctgaagcaattttcttactcataatcgagcttgcgattaacggggttgagttgactgtgccagtgacatcgcgtaagctataaagctttttgtcggcaggcgttaaattgcccgtttggcctgcgagggcaagacgttgttcattcacctgcttcagaaacgtatctgtatccatttcaacagaaaaaccgggaatggcttcgagcttatcaatcgtaccgccagtatggccgagcccccttcctgacattttcgcaactggaacgccaacagaagcaacgagtggagcaagcgcgatcgtcgttttatcgcctacacctcctgtagaatgcttatcaacttttactcctttgatcgcgctcaaatcaatcatatcccctgattccgccattgacagcgtcagctctgcccgttcttctttgttcatgtccttaaagtaaatcgccattgacagcgctgccatttggtaatcaggaatggtgccgtttgtatacccatcaatgacccagcggatttcttcctttgtcagagcttcgccatcacgctttttatcgattagatcgaccattctcatcgctcattctccctccaacggcaaagaaaagcagctgctgtttccttgccataattttttgctagcctgccctgcttaagatctgacttttttaactgaataaccttttactcaggctttagttctgctaaaaagctcgttccgttgctaggccgttccacttgaaaattgtcggctacggttgcccctatgtcagcaaatgtgcggcgtttcccaagattgactggttttatccctttattgtacacgagcaatggcacgtattcccttgtatggtccgtacctgtatgggtagggtcattgccgtgatcggctgtaacaatcagcaagtcttcgtctcctaattggggcaagatttccccaagtcgttgatcaaatgccataatggcctctccatacccgatcacatcgcgtctatggccataaagtgcatcaaaatcgactaaatttaaaaaacaaagcccttcgaaagacgtatttatttgttctgctagcttgtccatgccatcctcatttgaagtggtgcggactgcttttgtcacgccttccccatcatatatgtcagaaattttgcctaatgcgatggaagcaagccctgcatcttcaagcgtattcatcactgtgcgcccaaatggctttaatgcataatcatggcggtttgctgtccgcttccacttgcctggttcgccaacgaacggccttgcaatcacacggccgaccatatactctggagctaatgtcaacttacgagctttctcgcaaatgtcataaagctcttccaaaggcacgacttcttcatgggcggcaatttgcaaaactgaatcagctgacgtatagacaattaaatcacctgttttcacatgctcttcgcctaactcatctaaaatctctgtaccggatgcgaccttattgccaatcatgccccgtcctgtttcgcttttgagttgctcaaggagctccgtcggaaagccatctggaaacacttggaatggtttagtaatatgtaagcccattatttcccaatgacctgtcattgtatctttacctaaggacgcttcttgcataattccatagcttgccagtggagttgagacattttccaccccttttaaaggagcaatttttccaaggccaagcttttctagctcaggcacatgtaggccattaaaagcctctgcaatggaaccgagcgtgttcgctccttcatcgccgaactctttagcatctggcgcttcgccaatcccgactgaatccatgacaattaaaaaaatccgttcaaatcgtttcttcataatttcccttctctcgactgtattcaacctttagcttcccatctgctcttgcccgttatctcggatatcacaataatttccattcaggcttaagcgcgaggatggtagcgagaataaacatctttcatgcgcgttttagttacatgtgtatatatttgggttgtcgataaatcggcatggccgagcatttcttggacagaacgcaagtcagccccattttcaagcaaatgcgttgcaaacgaatggcgaagcgtatgtgggctaaaatctttttctatgttcgccgtttttgctagttgcttcatgattttccaaaacccttgcctgctaatggggcggccatggtgattgacaaacaatttatcatgccgttcatgcttaagcaacgcacccctgccccgctctaaataggtgtttaacgctttggtcgcttctttgcccaaaggcacgatccgctctttattccctttgccgatgacacggacaaaccccatggacaagtggacgtcatcaagcccaagagaaatcaattctgtgacacgcatgccagatgcatagagaagctctagcatcgctttattgcgcacaccaaacggcgtagatgaatctggtgcagctagcagtgcatccacttcctcaatggaaaggacacctggcagttttttatcaatgcgcggcgtctcgatccataatgtcgggtcatggtctgtccatttttcacggtacaaaaactgatgcaacgctcgaagcgttgtgacgttccttgcaatcgtcgctgaagacttgcctgtttcctttagcgtgaataaataatgctgcaacgtcgacctgtccactttggcaaattgatcgatccctcgtttctttaaataggcgccatattgctttaagtccctagcatacgactcaattgtatttggcgacagccctttttctactttaataaaatggataaactcttgaatatcgtgttccattgccatgaggaatttgctcctttaaccgcttattctcccatccataagaacctttttatccgctcgtcgattgataagtctgattcgccaacattcatgctcattacttttaacgcttttccttcaggctcatcatacttatggtactcgctaaattcatggctcacccatagaataccataataaaagatagtcgtgcacaacgtaaacaggatcgccgccttcgccatctgcaataaggactttgccatctcatcactccattattcggtcgttatactattaacctatgccggttttgcctcattctatacgtacaaacgtgatttatcacacgttcatagacatagaaaggcggttcagagggcatcgtcccattagagaacacgaaaaaaggccaaccgacagggacaatacccgcgcgccgattgaccgattaaacggaagcctctatgtactgggctccattagcagaaaatccttttttacatttgctcatttaattgtttgctgccttggctatgctgttcttgactaggctgttcttgacaacgatagcatattccgtggaacgttaagcgatgatctttaattttaaaggaaaaatctcgttctaccaccgcttcgacatcaccaagcaaatcctcagtaatttcatcaactgcgccacactcaatgcaaacaagatggtggtgaaaatgattggctccctctttgcgcaaatcaaaacgggaaacgccatcgccgaagttgattttgtcaaccacattgagttctgtcaatagttctagtgtacggtaaaccgtcgccaaaccaatctcaggcgctttttctttaacaaggaggtagacgtcctcagcacttaaatggtcttcttcatgttcaagtaaaaccattactgtcgcttcacgctgaggcgttaatttatagctctgagcatgcatttgctttttaatccgctctaatcgattttccataacggcctcctactcaaaagcgatctaaatgtacactcattataaatgagaagagaacagttgtcaattaataatgattccaatctgcaaatgaatatcatttatcatgttggaattattctaaaaagaggccaaaacccatttcattaatattggcgatacgtatgcttcgaacacagaagcgacagtaacaaatgcgccaacaattaaaacgagtgtcgtgtaccggaaaaaaggaggaaaaatcggctcttttagccctttagcaaacgtttgcttgattaaacgcaagcaaaacgacacactcgctgtgccaacgacaataaaggcaggaaccaacaccacattctgtggcaagacagacacaaacgcaagcagaaatccttgtgcgcccatttggttcaccaaaaacccgactgtaaagccaataacgaggcctttgacaaaaataagcacaaagatggccggcaatccaattaatgaaatgccaaggatccacattaaaccgatatatttgccataatgagtaaaactgtggacaaacaactcacttggcgatgtgaccacagaaccatttttcatttcattaaaaaattgacttaaatatgtaaacaagtcgtgccgctgcgataaactgaggctgttaacgacaattgcgccgaaaacaatgccaattagaaatagaacgattgtaaaaatataaatcgaccggttgttatctacatgtctagcaatcgcttcatagacacgatttggattgttcatagcctgtcccctcctgctctactttatgagcagcaaaagcaggctatgactgtttagcggcgattttttaatttccagtattgcaaagcgtaactagttttcgcatcatgaatccgcccttcctgctcaagccggtcacactccatttcggtcaactcgagcacgcggacgaattccccctcgtcaaggcgttgatcgcctttttttagccctgtagcttcatatacataaacaagctcatctgcaaagcctggcgatgtataaaatgacgtgatcaatgtgagcgcctcggcttggtagcctgtttcctcaacgagttcacgcctagctgttttttcgggtgcttcaccaggttccattttgccagctgggatttcaataatcgccttttcgagtgctttacggtattgctccactagcaccattttgccatcttcggtaatggcgactacagctactgcgcccggatggcgcaccaactcccgctttgcgacggttccgtctggaagtttgacgtcctctacatcaagctgaatcaactttcctttatgaatcgtttgcttagcaatcgtttgttcagtcaactctttcatttggtacccaccttgtcatctttgatgtatgtagcgcataaaagtgtatcatacttgaacgggaggtgctttgatgaaacgatacaatcgcgaaaatagcatcatactcattgggcaaaagtgggaagtgcttactgctttaaaacaggctgctaaaacatttgacactgtcgccgcttggcattcagcgtggaagcccgtagaaaaaaacagtcctcctctaaagcgaataaaatagtttagagaagttcctgcaatttgttatcaagcatctctttcgttacttcgccaacgagcacgtctgtgacaacgttgttttgatcaataatgtaagtcgtgggcaatgatgaaggcttaaacgcttgcataaatgccccttccgaatcaaagaataccggcagcgtcaagccttgctcttcgataaactcgatcgcatcttcagggcgcaattcttttgactggctgttgacagtgatgacagacactcctttatttcgatagtcctctgccacttccatcaatgccggcatctcccgtatacacggttcgcaccatgatgcccacacatttaagacgagcacgccgtcttggtaatcgctaaaagaagcacttgcgcccttatatacgtcaagctccatgtccaataaatgatcccctgcctgtaccggttttgattctccattaaattgccacacaaaaaacacaattgctacgcatgctccaacaagcacagccaatgtccagctccgttttttcattgatgcggttgcccctttccgattggccaaaagtttgctagaatgaaacagttcgatttatatcaaactaataagcagaagggaattcacttatgagtttactagaagcagtcatccttggtcttgttcaaggaattacagagtttttgccgatttcaagttccgcccatctcattcttgtccaagcattgttcggcatgacatttgccggctttagctttgaaattcttcttcatctcgcttctgttcttgcggttattctttactaccgccatgatttgattgagattattcgcggtttttttgcctatttcacaaagcgaacaccgcaaaataaagcgatgttttggtttgctatttatttagttgtcgccacaggcattacaggtgttgccggtattttgttcgaagattacataagcgaaacgtttaaagcacctatctttattgccttagcacttgcggtcaccggtctattcttaatcattatagaacgttttgtccgccacggaaaccgaacagaaaaagaaatgacgatttgggattcaattatcgtggggcttggccaatgcctagcgctcattcctgggctttcacgctctggaacgacgttaattgtcggcatgtttgctggtctgacaaaggaaacagctgtccgcttttcctttttgctgtccatcccggttattttagggtcttccgtgttggcaattgatgatttgatttcaggggatttgctcgcgagcacaggcttatttgagcttgctgcttcctttgttgtcacgtttattgcctcttggcttgggattgtctttttcttgaaccttgtccgcaaaagcaaacttgtctattttgccgtctattgtttcatcgtcgccatactcgtctttattttccaagatgcattgggacatgcagacatttaaattttgtaagacacaccataaaacgagttgggctatgcccaactcgtttgttttttagttcgcgctgttaagtgcttcgataaatgctttgcctcctgcttctacgccgcctttataacggtggacgctaccgccgagattgataatgacatcttcgccaaaatcttggcggacagtggcaatcgtttgaaaatcaatgccagcagaaggaattggaaaggcacgcttcatttgagtcgtcattgtcagctggtcttttacccgttgcgcttcttctggatttatgccgatcctgccataaggagaaggaaatagaacggcgtctgcccctgccatgcgcagcagctttcctaacaaaagacgagaggctatgccatgttgtttggagcgtgtcatcattcccgtcagtgaggaatgggcaaaaatcggtacgtcaatttctggatcttcacgaaggccttggagcacatcaatcccatacgcatatacatttagcatcagtgccggcgctcctaagccaattgcctctcttgcccgctcttttaactcaaatgttttgccagtaagattgacgacatacagcggcgttcgccctgtccgttctgctgcttcggcgattgcggctaacccagcgggcacccgttgttcataaggcgtccaattgtgttcgaatagccgctcatcatcttgaataatgtcaatgccgccatagctatgggcgagcatttgttcatggaaggaatcaattgaacggccaatcgccccttttgcaacgctcatcgcaagcgggcgcccttctacttccacgagatcacggattccctcaatgccatagagcggtcctggaaatctctccactaagtcgtttgaaaactgcaaatcaagcagttttacattcggttcgtaagacaaccggccatatgtcgttgttaaaatggagggaaagtctggcacttcataggcaacggggaatgaaatcgtcacaatgctgccttccccgtaagaggggtcctcgttaatggaaacgacttttcctttataagcaaagctttcttgtttctcagcttcaggcatttcttgccaaggcttagccgtgagcccagtggccattttctctgctttttcctcaataaattcatttgaatcacttacatagtacaccgcatttatttgtgccacagccaaacctcctcatcgacaagatgatttttatatcaacattacaaataaagcgctaccatgtcaagaacgctgctcaggccaagcagcgtccagattgaagcaattgcatctttcgttgttcataaacacctggtttggtcaaccttcaatcggttcacaagcgtttcctatcagcctggatcattttttaatgggcgtcttcctttgcttttcgttttaaatatttctctcgccgcttcttcatcgcttttgtaatgtagccgcctttaaaattgcgtggttcaaacgagacgataaacgcttgcggctcatattctgacacaattttaataaactccttctccctatccctgcgcgccgtgcagtcaaggcggcatcgcgttgacgccataccttcgacggaagaactggaaacactaaaacccatttccctaaggcggttaatcaatggttggtttttttgtgggatatttacttcaatgctcacatagccgattgccagtttttcttcgattactgcgccaatatatagccctatgccaaagccaagcgcataagcagccatattgtaataattcgataagtcgctaaacacaatgccaagggcaactacatatataaccccttcaagcatgcccattgccgcagccttttgctttagccctttaaccatcatgattgtccgcaatgttaaaatcggcacataaatcaactgggcaaaaaagataataagcgcttgtaaaaccaactccttcacctcgcctctgttccagatcaatcaaagggtagtttaccaggttcctttggcgaacgctagctaaaatatgcctaaaacagctggaaagtctagtataaaaaaacgcgcagactctaagcgcccacgcgtttcttccctattatttggctcttattgtaaaaagcgctgtttttccagccatcgcttcgctgttttgttgtttttcaagcgaataacgatctgggttggttagcacaactggcgtaatcgtgtgcgcagctttttctttgacaagctctacgtcaaagtcaatgatcgggtcgccgacggaaatggtatcgccttcttttacatgggcagtaaatccttctccattcatcgccactgtttcaaggccaatatggatgagcaattctgccccagatgccgtttcaattccaaaagcgtgctttgtcggaaacacttggacaatctttccactaacaggcgcgacaatatgcccatccgtcggctcaacagccaatccatcgccaatcattttttgaccgaatgttgggtcaggcacttcttctattgggacaacttttccattcaccggcgcggtaatggtttcctccgctggcgctgtctctttctttccaaatagttttttaaacatatgaccactccttactgtcgataagcgtcacactcatctcatttattattgtaataatcctgtttgcaccctgtcaaatttcgactcactcttcctttcccttgcaacagctaagaacagcagccgctaggctttactaacaggttagtttttaaaaatagggagccgcccacgcacttttccgcttatttgcataagctgtcgtgaacaaaaaatagatggggtgattcgattgagttttaaacatgacggcggttttgcttttattgtggtgttattcattcttctcgtgattgtaggctctgcttacatctgttgttaaaaaaaacacaaaaaacaggcacaagttcgcctgttttttgtttgcccgctggctttattggcaacaacaaaatagagcacctaacaatgcaaaaacaagcagttttcttttgcgcgtagatatggtaaagtatgtttgtttttaagacgatacgtgtatatagtacataaatatattgagcaggcgggatgaagaattggcacaacatacacttgatacaattaaaagaatggaagaacagtttgttgaccgcattgccgaaaacatgcggacgtatggcgtttctactacggtagggcgtgtgctcggcatcatttatatgaaccggaagccaatgacgcttgaagctctttccgatgaaaccggtatgagtaaaacgcggatgagccaagttgtacgggaaatgctgtctttaaatgttgcccataaagtgtttgaaaaaggcgtccgcaaagatttatatgatgtcgaaaaagattactaccaaacgttcatttccattttcgtcgcgaattggcaagctgtgattgctaaaaaccgagcagttggaaaaagaattcaaaatgaggttagacggtttatggagggagaagcagacaacttgtccgctgacgaaatggagcaattaaaccatttgttaaaagaaacggagcagtggctccattattacaaatggttagacgatcttgttgatttttttgagagcggcgatgtatttcaccatgtacccaagccagactaaacactccttgcgttagacccacatcccatcatcagattcaccttcagtaaacgtttttccattgcgtgccttcgcttatagcgggcacgccgtccaactatgcaattccattgcgacgcggccatcctgtgaaaacgtaaccccttcttccaatagccgttccttttgtgttttcccattaaacaaaaggcctgaggccaactcgccgttttgctttacgacacggtgcgccgggacatcaggcggcgattgccgcatcgcccagccaaccactcgcgcatgccggggtgcatgcaaatagcgagcaatttgcccataagaagcgacttccccccggggaatacggcgaacggccgtataaacatgttcaaagaaggcatccatcattttcccctcctctcgctttttattattggcaaaaacacgacctgtttttttataaaaaaggccaatcgaaataaacaatagcctgcagccccacccgcagtatttaagaggatgtcatcaatgtcagctacacgatgggtaaaggctagctggcatagctcaatcgaactggagactaaaaagctggcaatcactgtctttcctatttgtcggcagcaccgaactgacaaaggcaacaaacacccaaatgggacaaacagtaatacgttcccgccaagtataaaaaggggatcacgaattgtagagctaaaaaagccaatgcgatatatactgcggaatgggatgtagttataattacgcccggccaactcactaggttcaaacgaagatccataattccatgcaaccagtgtgatgtaaaacagtactgccatataagcagcgaacagtaaccgccctaacattcggacattcacgatcaaagcctcccctccatccacttatatgcaaagcttggacagcccatgaatggagtgggaaaaacaacttcgttcaactagtgaaaaagcgaaaaatatgatcgttcattcctggaaggtgctcatggccaaaatcaggatagagctcatacgattttttagcctttattttattataagcagcaaattgggtagacggcgggcattctgtatccattaaaccaactcccattaggacatctccttgaatccggtcagcaagatgctggacatcgatgtagccaaggcgttcaaaaatttcgccatggcgtttatgttgcggatcgtatgaacggaaataatcagccaattctttatacgaacgaaccgctaaatccatttgccacactcgcttgtaatcgcttaaaaacgggtatactggagcaagacgcttgatttcaggaacaagggcagcacaggcaagcgttaaggcgcccccttgcgaccaccctgtggccataagccgtgttttatcgatgtgaggcaatgttttagcagcacgaaccaattggacggtgtccaagaaaacgctgcggtaaaaaagcgcgtctggcccggcatcgaggccgcgaataatgtggcccctatatgtattcccccttacgcccccaggatcctctgaagttccaccttgtccacgcacgtccatatagaaaacagaaaaacccgccgctacataatttaacaagctgctccattcggctgaacgccccccatacccatggaacataaaaactgctggcgtcttctcccctgcttttggctgtacgtatttcgcatggatttttgcatttccagcgcttcgataatagaaatggtaacagtttgcaaacgaacactggaaagaagattcgactagagtgacttcgggatcaatcgcttcaatttccgttttggcccggttccagtattggtcaaaatctgctggtttagggtttattccttcataagctaacaactcgcgcaacggcatatcgactaatggcataagcgtcccttccctttttcgttttatgtatagtataccaattttcaaagggttcaaaaagcgtgacccacactcgtattcgtacacaaaaagcaaaccaagggcaggaggctagactgtgaccttaacctgcatgcacttgctttgcttccgtttcgctggcacaagcactcccaatgagcgctttactgagcgaagtactcacgattcatcaatttgaatgttgtatgccttcatccagtaatcgatttggacaaaatgggcaaggagttggggacctgccattaattggccaaaataaggtttccctgtgtcgaaaccacctttatctgcaatttctttaaggcgatcgcggttaataaaagtgaacaatggtgcgtccttttggcgaacgacttcctggatcgcctttgttacggccgccgtatataaaggatgatgggttttcgggtaagggctttttttccggaagagtacatcgtcagggagcaatccttgcaatgctttgcgtagtatccccttttctctgcccccatatgttttcatctcccaaggaatgttccacacatactcgactaagcgatggtctgaaaaaggaaccctgacttcaagggaagcgcccatactcatccggtctttgcggtctagcaagtttgtcataaaccaaatcatatttaagtaagaaatttccctccgcctagcttcctcaggagaatctccgtcaaaccgcggtgtttcttgaatcgtttctttataacgatcatacacgtattcctggagattaaggcgtttctgccaatcaggctgcaacaattgaatccgttcatcaagcgagcgcatccaaggaaaaccgtctatggccatcacttctgctttatggaaccatggatagccaccgaatatttcatcagcgcactccccggacaaaccaacagtcacatcatttttgatttgcttacaaaaccacaacaaggatgagtcgacgtcggccattcccggtgtatcccttacaaggacagattcttttagcaaattggccaggacatcgttgccgataatgcaatttttatggttggtgccgcaatgagctgcgactttttctacccaatcggcatcggcatttggctgaaaggtacttgccttaaaatatttttcattttcctcatagtcgatggaataactaaaaatcggagcgttcccttgcttttcgtagatgcgtgcagcgattgccgttaacgcgctagaatcgacaccccctgacaaaaacatgccaacgggaacgtcagcaaaaagctggcgctcaacaatatcttccaaaagttcacgaatgtgagcagcggtttcatgtgccgtttctgtatggatattgctttgcaattgccaataacgttttactacggaaccatttttactaaattgcaagtaatgggccggacgcaactcgacaattcctttaaaaataccgtggcctggcgtccgtgaaggtgaaagccccatcacgtcagctaatccgctacggtcaacaaccgcttcgatttgcgagtgggccagcaacgctttaagttctgatccaaagagaagcatgccatccttttctgtataaaatagcggcttaacaccaaggcgatcccttgccataaataatgtttgttcttgttcatcccaaacagcaaacgcaaaaatgccattcaatttttcaaggcatgcggctccccactctatatacgctttaagtaacacttccgtatctgaatggccagcaaatgtgtgcccatgggcaagaagttctttgcgtagctcttctgtgttgtatagttcgccattgtacacgattgtacatgtattgcctttagcagtgcgggtcatcggctgtttgccgccctctggatcaacaacgacaagccgcgcatgcccgaacgcagcgtggtcggacgtccatgtttcgagcgcatcagggccgcgccgattcagcgtgtttgccatatttttcatctgtttcgtttccgtgcgtaggtttctttgccagtcaacccacccagtaatgccacacatcgattccatcagccctttctaggaagtaagtaaaacctcagccttacctatcccttcactcctaacctatcgtattcagcccaaatcacaaaagtgcttcttttatggcgcaatcttttggacgaacgtcacaaagattaggaaaagaaacgcttgctacgaagaaaaagaaccttttagctttttgccttttaaaaagagaaacgccttgtcaacataactgcttccgattggcactagagctaaattacatctgctttatcgtttgtgggctttctctcaccgtacaccgagccgcagacagaaaaaaggaattgactttcttcgcaaggctcgatataatcacttcaattcgatatgtacggtgcagtgatgactgggaccagtaaaaggcagaatatgtaaagagagttggtttcaccggctgaaaaaaccgaccatcccttctgcgtttgaaacctaccccacgacgctgctggcaaaaaccagcgtagcattctgcgttaaagaatgggaaagtgggcataattaatgccaatgaaggtggtaccgcggagctttttccgtcctttttgaggatgggaaaagctctttttattttctcgaaccttttttcaccccatgaacaatcaagcaccagtagaaaaaatggctatagtaggaggtgcggccaatggccacaggaacgattgtcattaaaattggcagcagcagtttaacagatggcaacggcgccttaagcacggaacggttaagaggccatgtcgaagccatatgcgagctgcgccatcaaggcataaatgtgattgtcgtgacgtctggcgcagtcgcggctggttttacgctcattggctatcaccagcggccgaaatccatttcgcaaaaacaagcggcagcagccgttggccaaagcttgctcatgcaagcatatatggatgcattccgcttgcatggctacacagcagcgcagctgctgttaacacgagccgactttgcggatccagcacgtttttcaaacatttcacaaacattgcgtgaactcttaaagcgaggtgctattccagtcattaacgaaaacgactcgacttcagtcgatgaactgacgtttggcgacaatgaccgcttgtctgccctcgttagcggcatcattcacgcagatatgctctgcttgtataccgatgtcaacggtgtatatgaccaaaacccaaacgactcgcctaacgccaaaaaataccattacttagcaaacgtacctgaagcattgcttgatcgggtgagcgctgatacttctgctgttggaacaggaggcatgaagtcgaagctgcttgctgcgaaaacggcgattgagcttggtacaaatgtatttatcggcaatggcaaaggaagggaaacgtttacagatgttttacttggtaaaggcgatggtacgtatctcggcccctttacaaataaaacgatgtcgacgacaaaacaatggattgtcttccatagcgaaccggctggaagcattgaaatcgacagcggcgcttcaaccgcgttgttaaaaaggggcaaaagcttgctgcctgcaggcgtactctcagctaaaggcgatttttcagccggcgacatcattgaagtgtttttcaacaaccgccccatcggcaaggggaaaaccaactttagcaaacatgaactagagcttattaaaggactcaatagcgaggaagccttgtctctaacaaaacgttcaaaaaaagctgttattcaccgcgacttttgggtggcgacaaaaaaggagtgttcttattaatggcaactgcaaaattgatctcacaaaaagcaaaagcgcatgccccatccctttcacaagcaactacagcagaaaaaaacaacgtgcttcaagcgatggcccaacaactaaaagcagacgcagacgtattgctccaagccaatcaattggatattgccaatgctaagaaaaacgggcttagcgaccacttaattgaccgattgttgttaacaaaagcgcgaattaacgcgatggccacagcgattgaccacttaattgaattgcctgatccgattggcgcagtaaaagaggagatcaaacggccgaacgggcttgttatcaaggaaatggtcgtaccgttcggtgtagtggggatgatttatgaagcaaggccaaatgtgaccgtcgacgcttgcacattagcagtcaaaacgggcaacgctgtcgtcttgcgtggaagcgccagcgctctccactccaacaaagcgattgtccacacattgaaaaaagcatttaaaaactcgcctattcatcctgacgtcattcaattactggaagacacgtcgaaagaggaagcggccaacatgatgcagttaaaatcaacgattgacgttctgatccctcgcggcggggccaatttaattcaaacggtgttgcaggaggcgaccattcctgttattgaaactggcgttggcaactgccatgtgtatgtcgctagctctgccgaccctgatatggcatttgatattgtcgtcaacgctaaaacgcaacgcccgtctgtatgcaatgcatgcgaaacactgcttgttgaacagtcgtttgcaaaagctcatttgccagcactagtcgaacgcttgtctgcaaaaggggtctcacttgtcggcaataaaggagcttgcacccttgatccacgcattgcacaagcaaatgaggacgactggtcgactgaatatttggatctgcgcttagccattcgtgttgtcgctgatacaaatgaagcgattgctcatattaatcaatatgggacaaaacattctgaagcaattattacagaatcattggcagaacgggacacctttttcgccactgtcgatgcggcttgtgtataccataatgcctcaactcgttttacagatgggtttgaatttgggtttggcgctgaaattggcattagtactcaaaaactccatgcgagagggccaatgggcttaaaagctttaacgacgagcaaatatggcatttacggggaaggacaagtgaaagaataggaggcttattcatgacacatcagacaaccgtctccattttaggcgccggttcaatggctgaagcgcttataggcggtatagccaaaactaacggcggcaaagcgccccacatcaccgtattaaacgcgaacaaccgcaaacgtcttaatcagctccacgctgcctatggcgtccacgcggcgcaatcctatgaagaggcagttaaaggcaaagacgttattgtactagcaatcaaacctcataacgtccaagaagtggccgattcgcttgtttcactgctcgatccgcagaaacagctcgttatatccgtagcggcaggcatcaagcttgaaacgctagaaagctggctgcctgcggatacagcggtgatacgagcgatgccgaatacgtcggcccgtgtgcttgcctcggccacaactttgtcaattggcacttacgcgacagagcggcaacttgctttcgccaagacgctcttttcatctatcggcacagtgacggttgtagacgaacaacaaatggatgcagccactggcatagctgggagcggccctgcttatatttattacgtcgccgaagccatgcttaatgccgccattgcggaagggctttctccaactgaggcacgggcattgattaaccaaacgattggcggcgccgccaaacagctttccaatagcagcaaatcgcctaaagacctttataaagaaatcatgagcccaaatgggacgacggaagcagcgattgcccatttagatcattcttccgctcaagaactgtttcaacaggcgattcatcaagctgtcaagcgctccgctgcaattggcgcttcgtttgaacgcgatcccattcataagcaccaataaaggaattgctgcttcccttttttgatcgtttgctggtacgatagaagagcgcctttctgaaaacgcgctctgattcgctgtaccaattatttaaggggagaaccacaaattgctgaaagacaaatttgcgctggttgtcaaccataagacgttccaagcaacgattatcatcctgattttatttaatgcaatcttagttggactagaaacgtatccaagtatttatgaaaccaaccgccattttttccactttctggaccgaatgttgctttggctgtttacgattgaaatagccatgcgttttgcagcagaagggcggtcttttttccgaaaaggctggaattggtttgacgttgtcattgtattagctggccatgtatttgttggtgggcattttgtgacggtgcttcgcattttgcgcgtccttcgggtccttcgtgctgtatccgttgtcccttctttgcggcgcctcgtcgatgcccttatcatgacgatcccatcactcgccaatattctcattttaatggggatttttctttatatttttgcagtcattggcacaatgctatttagcgagctatccccagagtactttggaaatttgcagcgcacgattttaacgctgttccaaatcgttacacttgactcatggtcgagcggcttgatgagaccactcatggaatttaatccgtgggtttggatttattttgtttcctttgtattagtgggtacgtttatcattttcaatttatttatcggcgtcatcgtcaataatgttgaaaaagccaataaagaagaggccgacaatgcccattcacaagagctagaaacgatccaacggcaattggatgagttaaaagaaatgcttaaaaaagaacgttcgtcataaaacaaccgaagaccagttggcaccaactggtcttcatacatacggctattgcttttgtccgaaaaactcttcataaagcacgcggacagcttgtttagtatcttttgaatgaatgccgaacacaaggctaacttcagacgagccttggttaatcatttcgatgttaacccccgcttttgccaaagcagatgaagctctagctgttacacctactgtattatgcatgccttctccaacgagcatgaccatcgcaaaatcatgctcaatgtggacgtcgtctacgttaagctcctctttaatacgctcaataatggcgttttccaactgatcagaaagttgcgtttgccggataatcacagatgtatcatcaattccagaaggaatatgctcataagaaatccctgcatcttctaaaatttgcaatagatggcgaccaaatccgacttcgcggttcattaaatattttcgtacataaatggtggcaaacccttcatcggaagcaatgccaataataggattaagtgatcgctcacgttccgccaaaattaatgtgccactgcatttaggattgtttgtatttttcacacatacaggaatgtcgttgcggaaggccggaatcaaggcctcatcatggaagacggaaaagcccgcgtaagaaagttcgcgcatttcccgataagtcattcgtttgatttcaactggatcctcaacgataaatggattcgcagcgtaaacagaatcaacatcagtgaaattttcataaagctcggcttgaacagcagcggccaatatagcccctgtaatgtcagagccgcctcttgggaaagtaacaagatttcctaattttgagaatccaaaaaaaccgggaaacacgacgattccgtccatttcagccaacttggcaagcgcctcgtatgcttcaggcaacacttgggcattccctggttcatcgctaacaagaagtccagcatctttcgggtttatgtacgtagcttttagaccgattttgcttaaataagcagcaatgagttttgcattgttgtcttctccgctagctttcattatatcaagaaagcgccctttgcccgccactgtttgctcaagacggtttttcaaatctgcttcaatttcagcgatcacatcgcgattaagctctaaatcgtttgctatcgattcatacctgttcatcacagcattaaatgctgcttctactggctgatctgccactttagcttcggccaaggcaatgagcaagtctgtcatttttgcatcatcagcgtaacgctttcctggtgctgaaacaaccacgatcttccgtttattatccgctttgatgatggcagccacttttttaatttgctctgcatttgcgacggatgaaccgccaaattttgctactttcacgttctctccagccccactctctttctaaactaaaaaacgtttcagactgtagacaaacgctcgcatacttcgtcgtttgacaagcgttttctatcagtctgagtgattttatcgacctcaaacgcttaaaaacgttcgttaattattcataataccatattcaaaatatcgctacaacttaggcctgaaaaaaggagcccttttttctattctggctccttcaaccctctttatggcttgtacgcatcctctgattcggaatcgtctttcgtccgttctttctctcggcgctcctcttcctctttttcaatatcttcaagaggcaattcatcaaagggttgttccacttggtcgcggtttcgctgttctttccaattttcacttgtttctttcccttgttttcccatggacaaaacgcctcctttgtccattatgtacccgttttcatgctagaaaaaacctacataaaccaagcaaaccagagaggcccacgctttgtagcaaattcgacagctgtacaggatgattcagggacataggtggagtcattggcaacttctccgtatgtggactcgcctatattgtttgtaaacccagcttggtcaaagcaagcaggtgacgagtaggcatttttactgtaatcaacgatcacgcgctcactatccgacggtccgtactcgacttgaatcataaaccctaatgcaataataagaatgcttgccgcgactccgaatagccaacgatatcgacgcattgttttcctccttctcctcaatccatttttagtctacctattttggttaacggaagcaaggaaatttgacaggcgcgattatggagacttcaccaaacgtattttgttagattttcttacatcaaaatgcacatcaatcgtttttgtgtgatatattgttacaaacaacatggcgattatccattacagcgaggtggaatggcgtgtcttataaagataaaaaagtaattacaatcggcgttgtaagtgaacttaccggtctttcagaacgaaaaatccgctattacgaagaacggaaattgctgtttcctgaacgttcaaaaggaggcacacgcaaatattcttttcttgatgtcgaacgattggttgacattgccaataagatggaagacggtatgcaaacattcgaaatccgaaaaatggaacaaaaagcattgcgtaaacaggaagtccgtgagcgcatgctaagaggccagctgaacgccgcctttaatattcgtaaatgaccagttctccttcatgggaactggttttttatttcctatacattccacgcatgaacaagacgttgccaatagaaactaaaaaaaacaaaggagtgctattcatggcagttaacattgtcactcgcactgtctgtttgctcatcttcctaatgatgttttggccaaatactatttgcgatgccgccaataaagatgtcgctattattattgatgattttggcggcaatgtgaaaggagtagacgcatttttacaaggggatattcccgttacagttgccattatgccgaatatgccctacacaaccgagcaagcaattgcagcacacgagaacgggttagaagtgatcattcacttacctcttgaacctaaaagcggcaaagcttcatggctcgggccaaatgggattactgtggatttaagcaacgaagaaattaataaacgcttacgcgaagcttacgaacaaatcccctatgccgttggtttaaacaaccatatggggtcaaaagcaatggaagacaaacggattgttggtttaattgtggaatttgccaaaaccaatgggttataccttgttgatagcaagaccacccctcattccgtcatgccagaacttgctttaaaagcacaaatcccttgttttgagaacaagctatttttagacgatacgctctccactacccaacaagtacaggcaaaaatgcaaactttcgcagcaaagggaaacatgcatcaacacccaatcgcaattggacatgtgggagttaaaggggaacaaacttatgcaggcattaaagctggcctgccgcatttgaagaaacaaggctacaagcttgtttttccatctgcttggacaaattcacaaatagaacagactttacaaaaaaggaatggtaacaaatgaaaaaacctgcaatatggggaatcgcactggctgcccttgctattgctggcatggttttcacaagccaagtcgaacaaagccagccacatacagccgttttcgattcacatcagcctaaaagccgtgtccactctacttccaaagaccggttaatggcagaagacttggcaaaaacaacaacgctttttatctcctccctatccggacaattagaaaaatgggccaatacccagggagagagcctgacggatgaatttcaacaagaattaaatgaacacccttatatttccggcttttccgttttggataaaggaggttcgccgcttttagctgccggcacgctctccaccatcgatccaagcctattgatccatcaagataacggcatgcattattcgaatccttataacaaaaacggtaacactttcatgcttatgggcaaggacaaagatgacggacaacgtatcattggggaaatcgacctcagctttatccaatcctacctggctaaaacagcagcgatcgccgacagttccggaacgttttttgtcaatggaagcgacccaaacgtccaattctcgtccattgatgaacttccagacgaactggaagctcagacagtccctggactaggatggaatatttacgtcaaatctgacgacaatgtggccatccagtcctttcacgaaaaccaagcagtggtgaaattgccgccgcaaataaatggtagcgaatgggcccaaaaaaagggatacgaattgctagccgacaaccaccctttttatattgtgaaggacagtaataaggcgcttcagcgactaatcgaagatttgcagcaagacgaaactgtgttgtttgccgaaccgaactatgccttttcgaatcaagtccgcacagtagaaaagaaagtggagccaaacgacgaatatttcaagccataccaatggaaccttaaacaaattcacgcagatgatggctggaatttcgccaatggcactgatacaacaattgcaatcattgataccggtgtggatcctaatcatccagatttaaaagggaagctcacagaagggtacaacgctattgacgacagttctgattataaagacacaaacggacacggcagccatgttgctggcattgccgccgctgttacgaataatatcgatggcgtcgctggcgtatcttggcaaagcaaaatcatgcctataaaagtgcttgacgaaaatggcgaaggctcctcttattccgttgcaagggggatttattgggcagtcgaccacggagcggacgtcattaatatgagccttggcgattattatcactctgatcttttatatgaagcaatccaatatgcagataaacatgatgttgtcattgttagcgcctcaggtaacgacaactcagaagaaccaatgtaccctgcagtatacccggaagttatcaccgttgccgcagtagaccaagaccgcaaccgttctttcttctccaattttggagaccatgtcgatcttgctgcccctggagaaaatattccgagcacatacaaagacaaccaatatgccgttttgtcaggaacatcaatggcttctccacacgttgccggacttgccgccttattgcgttcagcgaatccagacttaaacaacgatcaaattggcgacctcattcttggcgcatgcgaccagcttggcgatggcgattataacgtctattatggctacggggaaatgaatgtacaagcttcgcttaaccaaaatcagccccgatagaagacaggttgaaggaaaatggaaatacagtggtttaagccaacgcttttatttagaagcgttggctttcttatgaaacggcaaaataacagccgtttgcttttgcacatattcacacaaatatccttgctttttccgtttaagaaatgtttccttccgaattggccttggagcagaccaagcgactgagtctaaattgctccatttgtcatgagtgatatactcttgcttaaagtaatactcatgtcctgaagaaaattgctcgcaaatgtatttaactgtttgttttgaatgcatggccaaacccctttcttactatagttttggccaaattcttcactcttataacgattgctgttcctgccttgactggttgtgctgcagcgtttaccattaaagaagagcgacagcagtcgaacaaatctattaaaagaagtgattccattgttacatacattaaaagaccttcctctttcggataaagacattgcgccactcatcatttctgccgataaagtggctcatgtacaaatgaacaaccctttgcagcatgccctacttgtattaataaaatcaggttatacagccattccagttctcgatgcctcctaccgccttcgtggtttaatcagcaaatcgctgatcctagatgcgatgcttggcgatgaagattttgaactcgagaggctgtcgacactaacagtaaacaatgtgatggcaaaagatgtgccatgtatccgcccggatgccccattttcaaaagcgctttctttattgatcaaccattcgtttttatgtgtcgttgatgaagaacaagcgttttctggcattttgacaaggcgctcaacactcgccctcatcagcaaataccttcaccaacactaatggtggccattttatcaagtgacgaaaaccgaagtcgaatgctattgtggtgattcgacctcggtttccgttaaagctttgttttgaaaataagcgtgtatgtgtttttcgcgagccttaaacataacgtttaaccctttagcgattatactggccggcagtttagcgcgaaaggaaacttcatccaccattaaaatagtgtccccttccctttcaaacgaatgcttatgacgccaatacgaaaaagggaaaggaggattctccgcttcgtcgataaaataatggcctttgcgctcctcagtgatgaccgatttccatttgatttgaaaagcggctaacataatcactgattctaaatccttctccccttttttacatactctcactttcggtcgcttgtgcactttttcaatatttgtcgcatccgaaaagaacgaccaaacttgtttcatcgtggcattgatacgagttctgtacgtaaatacaaatgtatccatttttgctcacctcataaatacaactggataattagcccttgcagttctccaattttgttgagcaaatccagttcgctcttgctttggtcaaagaccgcgttcgtcagttccacaagccctttatcgatttctttcaccaatttgtactgcctcacttgtccactcgccgcacttgacgctgtttccacttttaatgattccagcaaatggcttacacactgcctcacgcttcgcttaaatgcgtgcagttctgccgcagtccgatgttttgccaagcgctcgccatctttttctaacgtttcgagtatggcataaaccgttttctcacttttatgcccggcaatctcttcaaacacaccttgaaaggaagtgtgcgattgttgcgctcggattttgctgattggtaaaggtctttgttgctcacggactctctcaatatctagcatgttgatcgccacctttctttaagtttagcacgaagggcactgaagggaaaccgccgggaatcggtttgaaacttgtttaaaaataagttatcatgataatatagtagattgcatgtataccctctacttatatcggaggtggcgcaaaaatggtgaacccattattacaaacaaaacggaccatgtaccagcaaaataagcagcgcattattgaatgtttgtttgcttactggagccagcacaatgcctctcctgatttgcgcaccctatctatgatgagtggcataacggaagaaatgattttagaaacgatggagtatagttaaatcgacacgtacaaaaaaggctgattcaatggatcagccttttttctgtggaattacttcaacagatcaaccctatctccttttgactgctgttacaaaaggctccaaaagacacgaagttgatgacattcccttgtcatagtggaagcagccaccacacaagacatttcctctaaccttgctagtcgcctcccctctctgcgttttctgcttgatggatcctcaccaacaatccatgaaaaaataggagtagagatcaagtccattctctactcccgttctttttttatttcatttcctagctgagcgggcaatttctacgacaagttttgctgtattttcaagcgcttcaatcgaaattcgttcgcttgttgtatgaatcccttcataacctactgataagttaatggtcgggatgccgtatccagaaatgatgttggcatcactgcctcccccacttgaagtagtcataggcgtcaacccacatgctttaattgcgcgaattgcagtctgaacaacttttgtgtcctctggctcccgatagccaggataactgtatgtcacttgtacatcgcaacttgtgctcatttctaatgcggcttgttcaaaagcttgtttcatcgcttcaacttgctgttttagcttctcttctacaagggaacgggcttcggcggtgatcgtaacaacgtcgcaaacaatattggtttgcgtaccgccttcaaatcggccgatattggctgtcgtgtctgcgtcaatccttcctaacggcatttttgaaacagctttggaagcaactgcaatagctgatattcctttttcaggttcaacgccagcatgagccgttttgccatatacttttgcaaagatttttgcttgcgaaggcgctgacgtgatcatgccccctacttctccgtcgctatcaagagcatagccataagaagcagaaatcgcatctttggccaacgctttcgcaccaactaagccagcctcttcgcctacagtaatgacaaactgaatttggccatgtggttctttcgatgcttgcagaacacgagttgcttctaacattgccgcaattcccgctttatcgtctgctcctaaaatggttgtcccgtccgtttgaatatagccattttctacaattggttgaatcccttttcctgggccaactgtatccatatgggcaatgaaataaagtggatcaaatccgctgcttgtttcaggcaacgtacaaattaaattccctgcgccatggcccgttctttcttttgcatcatcttcgactacgtctaagcctagtgatgtgaatttttcttttaaaacacttgccattttttcttcatgttttgtttcagaatcgatttgcacaagttccaaaaactcttcgactactcttgaatacacgtcatcactccatcgctgcttttccatttcctttttactatagctgatttgctaattgatttcacgtttttccctcacaaagttcaacgagcaaaccgcctgtactgctcggatgaataaaagcaaccttccgtccgaagctaccgataagcggcaactcactcgtcaagcggacgtgcttttctttcaacattcctatggccgtctctatattagcaaccgaaaaagcaatgtggtgaaaagcaggtcgattgttttgtttcgctagaaagcgttgcaacgatacgttgctaggatgaggttcaatcagttcataccccactcccctcccattaataaaaacagcattaatatgatggtgtggcagcctttcctcatggctggcagtcgcttgaagcgcttgttcaaacaaaggaaggctggtgtttaaggaaggaacggcgatagcaatatggtcaatttgaaaatggtccataaaaacaccccttgattgcttgtgttttcttcgggtaaactaaaaagtagttgatttggggaggaatggagatgccgcgtaaattccagcgcttgatagtgtatatcatgattgcaaccttagttattggcacgattctaacaggagcagcaggactcggctttttctaagaaacagtgcgcgataagcgcactgttaaggttgtcgacaaagtcgataaccgcactcagactgatagaaaacgtttgtcagacgaggagtgccgccgagggaagatgcgaatagaacggaggttcatgagcatatgagtgaggcaaacgacgaagtatgcgagcgtttgtctacagtctgaacagtgcgcgagaagcgcactgttctaatttattagccccgcttccttcgcaatcgcttggaaggagcgatgttcgttgacaatgaatattttgctgccgatgtcgattttttggtaaagtcgttcaattgtcggatttgcgaggcgaatacagcctgcagaggcgctataaccgattgagcctggtcggttagtaccatgtagcccatatgtccggcctgccgtgcctaaggcatcaaaaccgatccatctgcttcctaatggattacgagcatctccaccgggaatattttttttgcggtaatagggctgttctactttcactaaaaccgtaaactgtccaaggggcgtttcatccccttttttcccagtggcgacaggatgaatttctgcaatatggttggcttcaattaacgcgagcgtattggtacggacattgacgatgacactcgctttttcaacctcccaatccgtgtcaccaggcatttgcaagggctgtagcgacataactaaaaaaatacacaaaaaagaccatttcacttcatacgcctctccttttacggatctttccattaggctttgcgaaatggtctttttttatcctgcttgttgctccaaagcgcatctttcacttgtaaatattgttcaaattcattcatcacatacaaaagtgatgaccttgtttcaaactcctcccgcgtagccggcaatggcatagcgcgaaaggctgcttttagttcttcaagccgcagcataaaataagggacagaattagtcggactgacggcagcgctcaattcgcttaaaaattcggcaattggctcgctttgcgttactgctccctcaaggctagctaagtggggcatgatccgttcaatgatttccaattgcttttcgcgcatggcaaagtagtgataataatggtcttcttcccgcaacaagtggttctccattgcctgaagtgcgattgtcttgctttcttttaacaaatggtctgcttcggaaatttctttgccatcccagtcgctctccccttctcgaataaaggcagccaattcccgcaaaataacagccagtttttgctcaaattcaatccgatagcggcgaagcacattgtctttagacggcatgtataagttcataagcagggctgtgccaataccaatcactattagctgaagttcgttcaagaaaaacgcgaatgtcgcctgcttttgcgtgtaaaggtgcatgacaataacagaactggtgactatgccttgcgccgactttgcaacgaggacaacaggaatgaacaataaaataaacagaccaacaatgattggtttgtagcccaatgtttcaaacatgaccgcactcataacaatgccgatcatacaggcaacaaaacgtgcccaagaaaccaatagtgagtttttcctcgtaaccgaaatacataaaattgtaatgattgctgcagaactggcataatccaatttcaatgcttcagccatgcttaaagcaatcacgacaccaacagcagtctttaacgtgcgataaccaattttaaatggcatttgatcccttttttctccagtcgttatggttgtagtgtaccacggaaacggccgaaaatcgactggggaatgcccaacttgcgggatctattctccttttcctttgttttgcggtaacacgacaacgatgttcttatgcttgcaataatggttaacgattgagcacgctttatccataggttaacatcgccgctttttcgcgtaccattgagccagccttgtttttcgttgtcattggcaagatgactttcacattcgttccccttttatctttcgactcaatatcaatcaagccgccatgcgtttcaacgacgcggtaacaaatcattaagccaaggcctgttcctttttcttttgtcgaataaaaaggctggcctatataattgagtctctccgcgggcattccagaaccaaagtctgttatttccacacaaacattcgggccttccgcatacatagtaatatgcacaggcgaatgtttcacactagcatcaatcgcattttcaagcaaattgtaaaacaatagaaaaagctcttttcttgaccccaacacggttgcttcctcgctgatgtttagcttaatagggtgaccgtcggtaagccgcttcactttgttcttttttaagagcgactgcaaaaaggctgccatttgaatcgattcgttttcacgtgcaggaggttcttcagctaacaacacatagtcattaataatgttttcaattcgctccaattctatattcatgatgttgatctggcttgcactcaactcgccaacttccgaatagagttggataaatccttttatcgttgtcagtggattgcggagttcgtgagccacccccgccgataagcgagagacaacttccattgcttcttttcgtttgtgcgcttgtttaaaaggttgctttaatacggacgcataaagacgttttttgcccaactgaaatggtttcccggcacatacgatgtcttcttcgtaaataagctgttttagtcgtttcccgtgcaaatagccgatcggttttcctaaacattcatgggcagctcgattcgcaaataaaatggttgccctatcgtgaacgaagtagcaatcttctgataaatccaacaaaccgaacagctcctctatctccattgcgatcttccttgattcccttgttgacaagcgccagctcttactaaaattgagataaaaccattttcattcattgatttcatttttaaaacccactttctggacttatcgttttctttttctctccttttacaaaacttccgcttggaacctcccttattttgaaatcaagagacagcaatctacaaaaacattcgtgaattgccaaaatgaatccttcttcattctttctttttcgatcaagaaattttgacaagaacaacaaaaagccgacatcgccatgtcgactagttgccatctttctgctcttctgctattttgggttaaccaaatcaccctacattcgataaagcaagtgtagaaaaagcagcataccaaaggcgctctctttagatataccctcacccgctcaatggatgcacggcactaagtagttatcctagcacagcttatggaaatggaatgctgctgataagatacccagcttgtgggtatggtatactaaagaaacacgctttaaggaggagtgcaggttggcaaaactagaaaaagcaacatttgcaggcggttgtttttggtgtatggtgaaaccattcgactcctatgatgggattgaaacggtcacatcaggctatactggtgggcatacgataaacccaacatacaaagaggtatgcagtgaaacaaccggccattttgaagcggtacaaattgtttatgatgctgctgtttttccatacagcaaacttctggagattttctggcaacaaatcgacccaactgatcctggtggccagttccatgaccgtggggattcctaccggacagctattttctaccataacgaaacacaaaagaaagaagcggaacattcaaaagaacagctagaacagagtggcaaatttagcaagcctatcgctacgcttatattgcctgcaaagcctttttatcctgcagaaggctatcaccaagattattacaaaaaaaacccgttccattatcaaatgtatcgccgcggctcagggcgtgaagcgtttattcaaaagcattggggaggagaaacgacatgaccaagccacaaaaagacgaattaaaaaagaaattgacgccaattcaatatttcgtaactcaagaaaacggcacggaaccgccttttcaaaatgaatattatgaaacagaagaggaaggcatctatgtagacgttgtttcagggaaaccgcttttttcgtcaaaggataaatatgacgcaggctgcggctggccaagcttcaccaaaccgattgatgaagcagaaatcatcgaaaaagaagacaggagccattttatggtccgtacagaagtacgaagtaaaaatgctgactcccatttggggcatgtctttccagatggcccagggccaaatggacttcgttactgcatcaactctgccgcactgcggtttattcctaaagcaaaactcaaagaagcgggctacggcgcctacgaaaaactatttgactaaagtctgaagcagaggaaaaattcctctgctgttttcattaagttttcccggtaattctggtatgatagatttggagtttgtaattcatttcgatcataaaaaagggtgatgaaaaatggaaacgcgtacagaaagagatacaatcggcgaaatcgaagtgccagcagaccgtttttggggtgcacaaacacagcgtagcctggaaaactttaaaattggcaccgaaaaaattccttttgaagtggttcttgccttcgcccacttgaagaaagctgcagccattgtcaatgggcgcttaaaaggactcgattctcgcaaagttgaagcgattacatatgcagccgataaagttattgagggcggactcgaagatcatttccctttagttgtctggcaaacaggcagcggcacgcagtctaacatgaatatgaatgaagtgcttgcctacttagcgaaccaatacttggatgaaaatggacatcatgatgttcgtgtccatccaaacgacgatgtcaaccactcacaaagttcaaacgatacatttccaactgcaatgcatgtcgctactgtcgtgtttgcggaagaaaacctcctgccagcgattcgtgccttcaaagacacacttgctgaaaaagaagaggcctttgcggatgttgtgaaaattggccgtacacacttgcaagatgcgactccgctcacatttgggcaagaaattagcggttggaaacatatgctgcaaacatgcgaaacactggttagcgaagcacttgaacatgtacgttctcttacgatcggcggaaccgctgttggcactggcttaaacgcgccaattggttttagcaaagaagtttctgctcaacttacaaaccaaacaggcgttgcttttaaagcatcagaaaactttttccatggcttgacaagccatgacgagcttgtccattttcatggcgcgctgaaagcacttgctgctgatgcatttaaaattgcaaacgacattcgcttgcttgcaagtgggccacgttgtggcattggcgaagtgttgattccggccaatgaaccaggaagctcgattatgcctggcaaagtcaatccgacacaaagtgaagcgttaacgatggtagccgcccaagttatggggaacgatgcagcagtcggctttgctgctagccaaggccattttcagctaaatgtatttaaaccagtcattatttacaacgtccttcaatcgatgcgccttcttgcagacgggctcaacaacttccgccacaaatgtttagttggcttaaaagcagatgaagaaaaaatgacgcaattgctaaatgaatcccttatgcttgtaactgctctaaacccgcacatcggctacgaaaatgccgcgaaaattgcgaaaaaagcacatgctgaaaacaccacacttaaagaagctgctattgagtcagggttgctgactgaagaacaatttgatgaatatgtagtaccaaaggaaatgattgctccaaaataaacaaaaaagcaggcatgttcgcctgctttttttattggaagagcggactcaaggaggctgaatcaaactgtgcgggctcttctttaaacaagaaaatagttatttcttttcttggcgaatggctttaaaacgcgttgcttcaaaaagttcttcccgatcaacgctaaataattttgcaattagcttcgcgatttcagcgctgacttggcgcttgcctgattcaatttgcgacaaataccccgctgaaatccctacctcttttgctacttcctcaaggctatagccttttttggttcgcaaaattcgaatgctactttcactcatcgttcttcctccttgagttcttcaataaaacacatcattacctattttactacgcaatcagcaattccttcaattcatttcgcgtattacttctttattttacagattgcaaagtataatggaacaagcttcaatgaaaggagaatggacggcatgtttgcatcacgattaaaagaatgccgcattaaaaagcagttgacaatgaaagaactgggccaagcgttaaatatggcacaatctacaatttcaggttatgagaatggcacaagaaaacctgacttagacaatttggcccgccttgccgactactttaatgttagcactgattatttggtaggccgactggactcaaacgattcctttatactccattctgatcagctcactagcgatgaaaaattgtttctagcagattgcttgcagctatacagaaaacattgtgcaacaaacaaggtataaacgaatttacatgacttcatcatacgtgtaacggaccacatacttattggatcgtagttttttaacttcaactaaagggccaatttcatatccattctgccaattatcctccaatttcgcttttacgcaaccagcttgaaatttggaacggaaaatttctttataataaacccagtggggttttcgacgtttgatcattttactcctccattcgtcacatgcgtcatcctttttaggttgtccatttttttctattttatcatagacagacgcttgactagacgaaattaactggctttgacaaaagtatgttaaactaagctaaagcccgttaagaaaggacgttgcatcatggcaggtttaaatggacagttatctgagctgaaaattgaaagtacatatttggcggagatgattcctatatcgatctataaaccgccccattatacaccattaaaatcgtacagactcctgatttgccaagatggccaagactatttccgcttagggcgcattccgcgccaagcggaggcattaatggaagaaggagatattgaggaagcggttatagtaggcgtcccttacccttctgtgcctactagaagaaaatggtaccacccagaaggagaagacgccaaaaactatcgacgctttctcgcatgtgagctactcccttttctcgaacaagaaatgtcgacagaaccacttccagaagcacgcatacttgcgggggattcccttgctgcaaccgtgtcgttgcaaacggcgcttgaatatccaaacattttcggaaaagtggtgctccattctccctttgtttctgagccagtacttgaacaagtaaatcagttttctaacagccactcgttaaccatctaccatgttattgggctagaggagacagaagtgactttaacaaacggggatgtagctgattttttgacgcctaaccgccaattaaataaactgcttgaacaaggcccattttcatatacgtaccatgagttccaaggcaatcatacgtggacatattggcaaaaggatttgcctcgggcgcttcaaaccgtgttgccgcttgcttagctcacaagagaaagtatgcgatcatatttcactgcacaagcaaaaccgttgtgatatcatctaaaaatcgaggggggttttttacttgaattacagcattgtcatgttcccatccaaaccgttccaagacacggctaacggctataggcggcgttatgatgcccattacgcaaacataccgccacatatcaccttaaaagaacggttttcaattgccgaagaggaacgatctaaaatcatcaaggcattacggaccattgggcaaacccataaaccaattgcgattgacgtttataaagtcgacacgttttaccctcagtcaacaaccatttattataaaattaaagaaaacgatcgtttgcttgctctttatgaagcgttacaccgcgatccgtttccacgcaaacgggcgcatcctgtatttgttccccacattaccattgcccagggactgccccaatcagagcatgctgatatcgttggtcaattgaaaatgatcgatgtttcccatcaagaaacaattgatcgctttcaattgctcaaacaacttgacaatggttcatgggcggtttacgagacatttttgctagaaggagattaagaggaaatgacttattggacgaaagtagccgctagtgagcaagaacactcggactgcgccagtgtgcggcatcatgtattcattgaagagcaaggcgtctccccttccattgaacgggatcagtatgacgagtccgctacacacatcatcatgtacgacgaaaacacaccgattggtacagggcgtgtccgcttattggctcataacgaggcgaaaattgaacgggtttgtgtggtcaaagaaaagcgccggtcaggggcagggaaacaattaatgacggcgcttgaggaagcgagcgcgagaatgggagcaaaagcagcaaagctcaatgcccaaacacacgcgagctatttttatgaaaagcttggttatacagtaacttcccctgaatttatcgatgctggcatcccccatgtcacgatgagcaaacctcttacaagtaaatctggcttaatagctgactgatagctggagatagagtctccagctattgttctattcgcttctcttgcacagatttacgttttccttccatcgttagaggctgatcgcggcggtcgtcaatgcgaatcgacgttgccgtcctcaaggctccttgttcaaacggcgcttcatggattttctggatcacttcaaacaacacaggcagctctgcctcaatcaacgtgctcataggcgtaagctcgtaacggatttgcttttctttctcatagtggtcaagcacttgttggatatatgctacataagcgctaacgcttgtcgaggaagtaccaattggaatgatcgatacgtctgcaattgccattcccttgttctcctttcgcggaagcctccgcttttttatgttttctggaaaagccacatagcctaactgttgataggcggaaattgcgcactgaagatggttctcgtcaggctctttcgttgtcacatgaagttgcaaccagtaagaaagaactaaaacgctcttttcaagcccttttagccacggcttgcgatgaaaaagttgataaagggccacgacagccagagccgcataagaagaaaccattagcgcttgttgaaatggcgtgaacaaagaaaggcttccacttagaaggaagacacttaaaaaataaacgacaactagcccggtggaacaaccacgattgcgaatatccgctctttttatcgcctgtaaccgttctgtacaaatgcgcccttttgcactaaacactttatgttctgcgccatggtacttttttaacggctcgggaaatagaaaatgcccggcaaacaataaataaaagaacgtataaacaggcaacccattccagctggttggaacgattttgggcacaataatcaaacacagcagagcgataatgagtgcgacaaatcgaaatggcattgtttttacaatcagtttgccagcttgtaaataggcttgcattccggcaggctttgcccatgaatgcagcttgccctgttcatcatagtaagcacaagccaaaaagcctgccccgctgtaaaaaatccccgcattaaacgacatgccgctaattcgcaagcaactcacctagttccaccgtttttacccaatgctgaacatttttggcgctaccaaaagcaggtgcttcaaaagtggcgtcttccatcgtcaatgcttcatggttcgtccacgtatgtaggacagaaatggtgatgttttccgcagaagcaggcaatggttggacaattgtacccttcgtgccaatgctttgatgttctgccatttccgtcggatatgcaaaaatgataccgttatcgacacgctcgcctttatagcgatgttgttcttccgtatcaaggactgcctcgccaacttccacttcgtctgccccagtaaacgcaatgccaatatagtcggttccatacatgccttctgctggcatttgcggccagctccattcaagtaacaatgtaccgtcttctcctcgttcagctaccagttcaatttcagctttcagctgttcatttgtcatcgtttcttcttgattcaagtaataaataccgctcaaagcgatcgcgatcattaaaatgactggcaatattaatacgactatatgctttctcaattgcaacccccttcttggccaaggcggcgataagcagcatgatccgtcgggccgattccggctcctaatgggattccttccgaaatcgcggccgtcacatacgctttcgcttttttagctgcttcaattggcttggccccttttgcgagttctgctgctatcgctgaagcaaacgtacaaccagtcccgtgagtatgctttctgtctagccgttttgcctttaactcaaagaaagcttggccatcgtagcataaatcaatggcttcccctcgtcgcaaatggccgcctttcaaaatgactagcttaggccccattttatgcaattgtaccgcggctgctttcatttcagcaatggttttacattctggtttattaagaagcatggccgtttcaggcaaattaggcgtaaaaacagccgcaagtggcaaaagcttctgtacaagtacctgttggccttctgccgaaagaagcgctgttccacttgtcgaggccatgacgggatcaacgacaatgttagctactcgatacgtttttgccaattcagccaccgtcgtgacaatgtctgcattgaccaacatgcctgtcttgatgacatgaactccgatatcacttaataccgctttgatttggtcccgtacgagtgaagcgtcaagtccttgccacgattgtacgccagttgtattttgggctgtaatagcagtaatggctgtagcagcataaacgccaagctcttgacacgtttttatgtctgcttgaatgccagcaccgccgctggaatctgaaccagcaacggagaggactgttggaatgggcattcgtacgcctccttctctgactacgaaaaacgttctggatcaaaaagggcgattggtacaggcggctcttgcccggccaactgcgcactcgccacttttgccgtaatcgcgcttaataaaatgccgttccggtaatggccacaagccataaaaacgcggggatggttgcgaagaaaaccgataagcggataaccgtcttgtgtcgccggccttaagccagcccatttatgaaacggcgtaagttcagctaaaaagggcactatcttatggttccaatttgttagacggcgaatgcctttgtcggtaatttctgtttgaaagccagcaatatcttctgaagcgccattaacaagtgtgccatttgcttttgggacaagatacccttggcttgtgtacaaaatgtggcgaatacggcctggttcaatgtgataagcacaaatttgccctcttattgggtaaatgggcaagttcaagccaagctggctttctagctctttcgcccatgcacctgtcgccacaacgagctggtctgctgtgaaacgctgccctgaagcgctctgtagctcgatgtggggctctgtttttacgagcgaaacgtgtttgagctgctcataaatgtggacgccgcgatttctgcaagcctgttgcaacgcctttacataatcaggcgcatagacatgagcttcttctgggtagtggatcgcaccaattatgtcttcggcaagctcaggctcttttttctttaactcttcgggtgtcaatacgtcgactttggccccaaattcctcttgccatgcttttctagtggcaagtgacaacaaatcagcttcatgataaacacaatgaagactccctgattctgtaaattcaaacgtcatgcctgactcttgttttacggatgcttgccattctttaaaagcgcgcaaacttgctaaacaaaggcgaaagaaatcatctggatcctcgctaatttctgagtacggggcaagcatgcctgcagctgcaccagatgcctgcccgccgcatgtgtttatttctagaacagaaacggtcttgccgtccattgctaactgaaaagccacagacagcccgataacgccgcctcctaaaacaattgtatgctccattttgactaccccttactgtgactggacaataaatggtcaagctggctgcttgctgtcgcatagcgcttcatcggaatgcgccctgcttcgtaggacagcaaaccggcttcaatcgcttgtttcattgccagcgccatctttactggatcctttgctttagctactgccgtattcattaatacgccatctgcccctaattccattgccttggcaacatcgcttgcagaaccgagaccagcatccacaataatcggtacagaagcttcctcgacaatgacgccaaggttatacgggtttaatatgccaaggcctgtgccaattggagaagccccaggcataactgcggctgcgccgacttcctcaagttttttgcaaagaattgggtcatctgatgtatacggcaatacagtgaagccttctttcgctaaagcttctgtcgcttttaatgtctcgaccggatcaggcaatagcgttttttcagatacgctaatttcgactttgatccaatcgctcagcccagccgctcgggccaaacgagcaatacggattgcctcttccgcattgttcgctcctgatgtatttggcaagtattgaaaagtacgcccttctaaatgctgtaaaattgcatcctcatcaggatgttctaggttaatacggcgaatggcaaatgttaaaacctccgctccggaggctttaatggcttcattttgaacaaccgggtttggataacggcctgtcccaatgaaaaaccgcgatgagagcgtttttccgccaatgacaagtggtgcttttttcatgtttatcctccccctacgaaatggactagctcgattttcattccttcactcaaagaagtggcctcccagtcaacacggtcaataatcgtcccgttgacttccgccaccactaattggctcgctaagccaaattcagaaacaagttcgcttagcgttgtgctttctgaaattcgttcttcaccatttacgactaatctcattgacttgcctcctccatcgcggcaagcaacgcttgactagctgcttttacgtcacgggcagcaacaatttcggttataacgcaaatggcttcagcacccgcttcgatcacttcacggacattatggcgtttgatgccgccaatggccacaaatggaatcgtcacatgttcctttacttcgcgaatataagccgttgtaactgggtctactacatccgctttgctgtttgttggaaaaatcggaccgacgccaatataatcggctccgttcttttcagcttcaagcgcttcctctaacttgtgggtagaaacgccaatgattttgtctggtcccagcaattttcttacttctggaaggggtaaatcatcttgtccaacatggacaccgcttgcgtcgacggcaagggcgacatcgatatggtcattgacaataaacggaattccataatcagctgcaagcttttttagcctacgggctttttccaacacagcctttttgctgctcgttttatcacgaagctgaataatgtcaaccccaccttggatagcttcttccatcacttctacgacatcgcgtccaggatggaattcttctcctgtgatcgcgtaaagtcgaaaaggcttcatgttgttccctccttttgcaaaataaaaaggccaaagcgaggagcttcggccacatgcaagcatgtcattcaatcactgcaaaccgacttccctccgctggcatcacccagatcaggttattagggtaaaagaaatacgttcttattctcagcctaacttcattaggcacccctagtctttctatatcattatcgcatacattgatccatttgcaaaaacaaaagtcgctctttcgttgttataacggcaaaaaacgggagcccgcgattccgggttttgtcatttcttttggatcaagaatttcattcaattcttcctctgaaaggatgccccgttcaaggcaaatttcccggaccggccgccctgtttcaattgcttctttagctacacgggtagctacttcatagccgacatggggattgattgccgttacaataccgacgctatgttctacaagttcccggcatcgctccacgttagcggtaatgccggcaattgcgtaatctttaaagacgcgcataccgttttgtagcaccgttaatgattgcaataaattaaaaacgagtacaggttccatcacgtttagttcaagttggcccgcttctgaagcaaggctgatcgtatggtcattgccgataacttgaaaagaaagctggttaatgacttcacacataaccggatttacttttccaggcataatcgatgaacccggctgtcgcggcggcaaattgatttcattcaatccggtccgcgggcccgagctcattaaacgtaagtcatttgcgattttcgataaattaatagctaaaatttttaacgaactagaaagctccgtataggcatctgtattttgggtggcatcgacaaggtcctccgccgttttcaacggcagctcagtcaagtcagccaaatgttttgcaactttttcaatgtattccggtttggcgttcaaacccgttcctacagcggttgcacccatattgatgtcgtggaggtggtctgccgaacggcttacccgttttagatcacgggctagcactctgcggtacgagccaaattcctgccctagtcgaatagggactgcatcttgcaagtgggtccgccccatttttaggacgctgtcaaattcttcggctttcgcttccatttcgttgatcaatttctgcaattcttccgtcaagccctttgtcatatttaaagcggcaatatgaatcgccgtcggaaatgaatcattggtagactgggccatgttgacgtgtgtgttgggactgacttttaaataatcgcctttttcgccgccaagaatttcaatcgcccggttagcaatgacttcattggcattcatattaaacgacgtgccggcgcctccttggatcgaatcgacaataaaatgatcattcaaacgcccttcaattacttcatcgcttgccttaataatcgcttcagcaatgtgggggcgcagtacaccgacatcgcggtttgcaagggcagccgcttttttcacatagccgaaagcgcgaataagttcagggtggggcggatagccggtaatcggaaaattatcctttgcccgcagcgattggatgccataataagcatgtttcggtacttgtttttctcctagtaagtctcgttcaacccggtactccatttcatgcgactccttttactcattcactttttcctaacatctcttcttcctgtgttgcttttgcctgaatagcaagccaaacagcaccgtaaatcccagcgtcattacctaaatgagccaatttaatctcagcactctcagaaacacggggcaacgcaaattgcttaaatacgaggcgaagcggagcgagcaagctttctttcgctttagaaacaccaccgccaataatgattttgcttggattgagcgtattagccaagttcgctattgcaaaaccaaggtgaaaggttgcttcacttaccacatctttagcaagtgcatcgccagctttagcagcatcgaaaatatcttttgtcgttaacgccccttcttcaaagcgatgcaaagcgctgtctttatttgttgttaacttttccttggccatccgtaaaatgcccgttgccgaagataccgtttccaggcaacctgttttgccgcaattgcacggtgccccaccttcagggataactgttatgtggccaatttcgccgcccattccacttgccccgtggagaatttgccctcttgtaataatgccaccgccgacacctgtaccaagtgtgataaacaactcttcttcagcgccatctcctgcgccgcgccatttctctccaagtgctgccaaattagcgtcattgtcgacgcggacaaccactccaaggacgcgttcaagctcttcccttagtggatagtttcgccagccgatattgacggcatggtgaataaaaccagttttcatttcaatgaatcctggtgcacctactccagcccctaacaaggttgcatgttgcggcagccggctttgaatgcttgcggcgatttgatcgacaatatgtttgccgttttcgctcacgtctgtgggaatctcccatttatcttttaactcgcctgtttccgtaagaaacgccaactttacggtcgtaccgccaatgtcaattcctgcatagtagtcctcagtcattcgctctctcccccatttttgcagcccgctgttcacgttttaatacaagcattgcttgttggaattcgccacgttcgattaggccaagtcgatgaagttcctccatttccatttgcatcaactgcatgtctgcatccaaatcccttgtataaatgaaagcgccatattgctttaacaactgcttaacttcgaaaagcgttttcattgactcacctctagcttattatatcagtttcagtactgcaataaaaagaaatgagatgagaggcaagaatgccgcaatgtaaacatttcgtagccatcccaatatcgtattatacagcaatatgcctaaaaaaacgcttcctgtaaacaaaattgccattcctaatgtaaaaaacgtgccgaaccctgccgttccccattgtacgcccatcaagaaaaacagaatagcagcaatgaacccgactggacttacacgaggacggtaaccgcaagtaggatgatacgaacggaacaaagcgatgataaacaaaaacgagcacatggcgattacaatgtccaaaaaccgcaagccaagccaattcgggccaatcagcgcaagaaacatgccgacataagcaaaaaagaaaaagctaatgctaaacacggatagccctaaaataggcgggacaaatttcatcgtggcgacgatcccgccaattgcggcgcccaacacaaacacaaaggcggccaccataaatgcaaaccccatgtgatcaacccctcatgaaaattgttaaacaattgtactactatagcttatgtgcttggttgaaaaataaggacatgaatgccatgatggagatataaagaaggagtgggaaaatgggaagagatgtaaacgacctattagaaaaagcaatttacggaaatccagaaacaaaaccagcggaacgccgtttgtttttgacgaccatctttgaaagggtctatattgctttaacgaaaaagcaagtccaggctgccccggtttacagggaagttgaacaaacgatggctaaggctaacaacctccatctgtttttaaatggcaacctggcttatagcgactatgcagcttacattaaaatagcggttagccagaacgttccatacaccgttgtgaacccgccaacgccgacaccctttgcccttgttttagctgacaaaagccagccagtgcaaaaagcagaccgttttataaaagatgatttgtacgaaatagacatggctgctgattgaaaccccgatttgctaacggtccggatcttggggatgaataatgactggcctgcggttttttacaggcattggcactcgaaacacgacgtcccgtaatgcttttgcattaaaaggaataaagggccacatataaggaacatccatcccctttaaacggacaagcatcactaaccaaatggtcgaggcaatcataagccctggcaactgaaaggcggcagtagccaccaacaaaagtacacgcataaatcggttggcaagggaaagttcataactaggtgttgcaaacgtaccgacagcggcaatcgctaagtagaggatcacttctggggaaaagacaccgacttgtatggcaatatcgccaatcaataaggcagctacaagcccgagcgcttctgcaactgcattcggtgtatgaatcgacgccatccgcaacatttcaatccctgcttctgcgatgacaaactggacaaacagtggcaagctccctttatcttctgtaccgataaaggccaaactatctggcaacaaaaatggatttgtcgcgaataaataccataacggcagcaagaagatcgacgaaaaaacagcggcgaatctgactagccgcagcattgcacctatgattggtttttgacggtactcctctgcatgttgaagcaagtgccagaaagtagtaggtgtaatcataacacttggcgacccatcgacaagaataaggacatggccctcaaataaatgggtggcacacacgtctggccgttctgaataacgcacaagtgggtacggattgctgctttctttaaagataaattcttcaattgatttatctgccattggtacaccatcggtgtcaattgcatcaagggcagcggtcatttgctcgacgtaacgcttatcagcaatatcgccaatatacattaaggctatatctgttttagagcgtcgcccaacttgcttgaacacaacgcggagcgtccggtcacgaactcttctgcggatgagagctgcgttcataacaagtgtttcgacaagcccgtctctagaaccacgaacaacttgctctgtatccggctcctccgggcttcgaacagggtactccctcgtgtcaatcagcaggcaatagtcaaggccctcgacgagcaaagctgctggcccagccaacacttgctctacgacttggttcaagtctctttcggtttcaacttctgcataaggaatccggctttgtagtaaggcatcatatcggtcttgcaattcctcttcagtcgtgtgggaaagttcccgttgaatttgtgtcagcgcaatgtctttggcaaaaccatcaactaaaaaaagcgccatccgtttgtttgcatgccgcatttccaaacaaatcaaatcaaagttgtcttcaaccgccaattcctttttcaaaaaggcaagccctttttcataagaagtcaacttttgctgtttttggccaggcattcttgtcaccctttcaatcgtccagtccttttacatagcttggctttcctttccaaaaatatgtagtcaccgtcaggaaaagcgaacaacaaaaaagccagttccactactcaactggctgcttgacagcacactgacttctaatacgtgctagtgctgttgctgttcaatttcttcctgcacttctcgataacgatcgatttctacatctggatgctcgtcttgctctccttgtttaattgcctcttccaccgcgtgctgagcttgctcaatttccccttgctgccaataaataagggccagattaaaccacgcttgatggaagtggcgattttcagaagtgacaaactccagcttctcctgtgcggccttatctttgccgtcttgcatatccaaataggcttgcaaaaacagcagatctacatgctcactatcttgttcaagcccttctgctacaagaggccgtgcttcctcccaattcccttgctgaaacaggcgatttgcttctagcgcggccatatctgggttgactgtccctgcggccgactgatagccaaaaaacagcaaactagctgccaggacgatataacctgccaatgcagataatgaccatagcacatttgtttttcttgtttcctttggcatacgtacagctgcagctgccaaaaaaccaccgactaagccgccgccgtgggcgccaatgtcaattccaggaacaataaaaccgaggaaaaagttaatgatcaagagcacgatcacactgcggcccagtgtgcgaaaaaacaaagaaggctgtttaatgccgaaataaagcaaagcgccaaaacaaccaaataaagcccctgacgcccctgctgacaaagagtcggtgaaggcaaagctaacggcagatccaaataagccagccatgaaataaatgaccaaaaaccgtatcgacccaaaaagttgctccactgcactgcctaaaaagtaaagcgccatgccgttcataaacaaatgaaaaaagccaatgtgcaaaaacatcgctgaaaatagacgccaccactccccttccacaatgagcggattgtattttgcgccaaagtcaattaacgtctcaatgttggtgcttcctccatttgcttcaaggacgctaaacataatcaatatcgaaattaacagcgcatagatcacgcgaggttttccaaaaaacaacgtttgccgttcttttgtctggcggccaacgctcgtgcgttttacgttttcgtgaatccgcaaaatctcctgctccatcgcctcatgagaatccaaagcctcaaacggtggcagtccgtcattccctaatgtttgttcagtaatctcgttgtatgtatccgtatctgtatgcaaggcaatgttgcggatttttccttttcggttaccgatcgtaaaaggttccatcgtttcttcccatgagtcaacaggaggcaagctcatcacatagacgttttctccttgaatttcccaaacgccaagctgtttataaatcgtgttgaattgctgcttggcatggccgatatcccgtttcaggcgattcgcccaatcgacttcagagagcacaatgcgaatcacacgccgcggtttcacggtatcgtcttctagccatacttgcgtattgtatagcgcaaggacgcggaactgtttctttagtgcataatgctccacgatcttccagaaaaaatagcggtgtacaaccgtatccaagcctaattcctccttatttctgccagttcttttattataacaagtttgcctaaaaagaaacgaaagaaaagccctgacaacacgtcagaacttttctttgtataattccgtcggctcagctggtcgagtaaagagagtgggcataatacggttacgaacaaatggcattcttaacactgccctaacggccagccgcctgagcagtggttggcgcaaaaacgcatttaacagccgatatcggtatttacaaatagcaagaatggcaataaacgtcgagacagcgactaacacttgacgcataacgtcacctccactcttactataccgacttttgtttgtttttatccaaaggagctatgccgattcctaaatagccaaaggcaaccgtaagcattggagataaaataaggaaaaaagcaaaaggagcgtattcaagcacagatacaccaagtgtttgtgcaaaaaaagcgccgctcaccccccatggaataaggggattgacaagtgtacccgcatcttcaagtgtccgcgacaaatttttcggggcaagccctgcctgttcatagtaacgtttgaaaaaactgcctggtaataagattgataaatattgttcccccgttacagcattagtgccgatcgaggctaatgctgttgaagcaattaaatgccccctctttgccaatagctttttcatgtttgcaaacaacgcttcaataaaaccgatgtgttgaatcacgccgcctaaagcaagcgccagcaacactaatgagacggaccacatcatcgattgaattccgccagcattgagaatgccgtccaatagttcattgccagtcgttccctcaaagcccgactgcaatacggttaacatataagccagtgacgactcttgctgaaccacgacagtcaacaacaagcctgaaacaattccggcaactaaaacaggcagcaccggcaaccgtagcatcgccaacagaacaacgagcaaaggcgatagcaacgtgagccagctaatcgtaaacgatgcctttaatgcttccaagagcccggcaagatcagacggctgtccgctttgttgcccaccgattatgaaaaacaacaaataagtgatgaaaagcgctggtacggtcgtccacattaaatgcttaatatgggcaaaaagctgttcaccggccactgcaggtgcaaagttggttgtatcggataaaggcgacattttatcgccgaaacaagcgccacaaacaactgctccagcagcgagtggggctggcacgcccaaggcaatgccgacgcccataatcgccacgccaactgagccaacagtcgtaaacgcgcttcctgtaaaagtggaaacgagaatgcagacggttaaagcgctaatggcaaaccattcaggcgtcaacaactgtactccaaaatacaatagcgttggtactgtgccgctcatcatccacaccgcgatgactgccccaacaagcattaagatcaataatggggcaacgcccccttgtatgcctttgatgagcgccccttctaatgatttataagagaagcccaataaccgaccccaaataattgtcacaataagcgccaacaaaattggaagatggggatcaattttaaggaagaacatgcaaccgcctaatatagcgataaaaaatagcaaaaagactataaccattaataagctaggtttctttcccataataaaacaccgaagtccttttcttcattctatgtcactttaccgcgtcggtgcgaattagcaacaacttctgctagcttaaatgtcttcctttttttcgtcaagccccaaccacgattttacgattatgcaaagtgcctagagatgccctaaaaaatattctctataacaggtagcctaaggtgttgaatttgaatggcacgaaacgagaaagaacgacatgggcgctccggtactagctgtatgttttttatccagccgacttttttagtcgccaatatatttgctgaaaagcgttctggcgcggctaatatcttccgttccttgtacaagcactcgcccatcaggaaataggaccaattgttcaccctctgggagagagacacggagaagaaagggcgtttctttcacagtggcgattggttgaagcttcgctgcccactcttttaactgaaaccgcgagccagtcgcaatttgtacagtgtctctaccacataatgttgtctctgcttcttgctcgacttgtaatgccggatactcatgcaattggcaagtcgggcagtctgatttcggagcctgaaacttgagcttatggtcataattgccccacaaatcaaatgtctgtacagaacgccgtaattgatctgttgctccgactaagtatttcattgcctcgaccacctggtaagaggccacaatatcaacaacaggagcaatgacgccgactgtgtcacacgtctcccctggagaggcaccgcttgtgataaaacagcgcaagcatggcgttttttcaggaactaggaaagcactcatgcccctggcgcttacagctccaccatacccaaaaggaatgcctttcttaaaacaggcatcattaagcaaaaaacgcgttttaaaattatccgtcccatctaagacgagatccataccttccattagcatgtccacattttgtatcgttacatcttctacaaatgcttcaatatgtaccgatccgttcactttttctaacatttgttttgcagcgaccgcctttggcaatgcttgttctacatcgctttcagtaaacagcatttgcctttgcaaattgctcatttccacgtagtcacgatcgacaatgcggatatggccaatgccagaacggaccatgtggttagcaaggaccgttcctaaggcgccaacgccaacaattagcacacggctgtttaatagccgttgttgcccttcctcaccaattccagaaaacaatagctgtcttgaataacgttctaaatgagccatgcgcgtttcctccttgttccaccaattatgttaacagccatcgcaaccgccccgttatcgcccaatcaatgcgactgctaaaacgccaagcgccgctcctgtaaacgtacaaataaaattgatcgtgtcgtttgttgccacacggtacccttttatcttttccgttttctctccacaatggtttagtctttctgtctctaacccgcaaacagggcaacggtacaacacttgaatcgcagcaccaaaaagagaatcagctaaattggcgagaaagccgattgctgaatagactagtaaccagatatggctcaatggcgtatatctccaccatattaaaatcgccgttgctgcgacaagaaaactgcctgcaaaagcggcagccataccaagcgctgatacagctcctgatacaccaggagaaacgcgcttcaaagtcaatagatggatcggtttctctctgctatattttccaagctccgatgcccaagtatcggcagtagcgccagctaaactgccaataaatccagcaaaggcaaaggcagcatagccaggaaacaaccaagccaacaacgagcaaagaccagcaacgccaccatttgccaatacttgccatgcatcacgagctccttgtttggcaaccacatcgacatccacttttgaagagtcaagacgtccccatacaatggagctgccaaagaaaacggcaatcaccactaacccccctacaccaacgcccgttattgtcagccacccaacaacacacgcggcccacataccagaagcagtcagcttgtctagcttgtataaaaggagtgccgctatcccaatcccaatataagccaaaagggagatcatgaagcatcgaccctgtcgtcagagatgaccttgtcaatcagaacatcatggggttctgttggcaaatcagaaaacagttgttcacggaaacataacgcaacggttaagcctgaacagcttggcaaaaaacgatcataaaaaccgccgcctaaaccgagtcgttttcccgcctttgtaaatgccacacctgggacaacaatgagctctagctcgtcagggcgaacgaggcacgcttcctcttgttttggttcaaacaggccatacttgttttctaccaattcctcagtagaggttatgtaaaagaacgccattgtccgctctttcatgttaatacgcggcaaggccacttttttattctcagctaatgcgccagcaatcaaaggcgctgtctctacttccggaaagcgagagaccgttagcgcaatggttgttgcctgattccaaacatcctgttgcataagcaaatcagcaagcctggttgatcgttgcttatacacatgcgctggcaacatgttcaactgtttagagacgtcatttcgaatgttctgtttactacgcatatcggcatcactccaagtatcatggtcacggcaaaaaaataagcagcggatgaccggctgcttactttgtttcgcgatgaagtgtgtggcgctttaaacgcgggctatatttcttaagttcaatacgctctggatttgtgcgcttgttttttgtcgtgatataattgcgatcacccgtctccgtacaagcaagtgtaacttgaacacgcatctgttatccctccaaactcgtcctacatactcagctatgatagcaaattccatcatattttgcaagcttcgatttcattgcccataagcggcctgcagccttttatgggattgttttaacgcttccaagctttgggaagaaagcatccaggcatggccttttacgcttgcttgagaagggaggacacaactcgcggccaacacgctttctaagctcgtagctgagaacggcgaaaaaaacaatttaccttcttgagaattccaatttttcttcaagcttccggctcccggctgaataaaagccgcgtcacgcatcgtcaaggaaaacagcgaaaattgattctctgcgtgatggatgagtgctttatcttgaggggaataaaaagcaatgccttgcgactgcattaaaggcaaatggtgaaacaacaatttcacctgtttggtgtcggagccctggttttggattcttacttctctcaagcagccaaggcgatctggtgactcacgatcaatgatcgtcacaaggatattccatactttatgaaatgcttggctcataatcgataatgccgtttttgaaaacgcagcttgaacactccaatcgccgtcccccacccaagaggtcttcccatcctgccaaagcccaatacgcgagagtgcctgttggccctcacatagcttcaacctagcatgaatgtctacataaaaagacgcttttgtagcggagtccgtatttaattctcgcgaaaagtctggcaaaacgtacatcgaatctctcctttattcagctcattttttgtcaacatgcatgatcgtaaatttcattttcaaaaaactccacaaacagagacaacattttaaatttgcaaaaattaattttggctaatgctcgtttgttgcaagctcccatgcttaggtcccttcgacaataggcgaatgcggcttattaatgcctatattcttctcgctctcgcttcagcctctagcctactgctgctttcgtcttatatacagccgtttggcttatgtaaagcttgcattccatacgactttaaaatagccgtaaccattccacacggcataacgacaaatcgtttcgcctaataaaagctctactaacagcataccccttcttttcgcatcccacaagaagtgcaaattgtataattttgtagaaccaattccctagttgcagcaagtatttccctttctctttagcctgttatcatagccattacttggaatcatgtctgattttgtcaaaaatcaccgcatcgtgccataaatttaagattttgaaatgaaaaatcagcaatttcatgtataataataggatgtaacacagttgataaagtaggagggtacgttttcaatggaatggacattggccattttactcgcagttgcgattgccttgcttgtgctttcgtttttcaaaacggaaaaaccatcgaaagtggacgagcaaatcgagcagctttccatttcctttatgcaagagctgcatcagctaaagaaccaaattcgcgatatggaactcgacgctgaaatcgctgcacatgagccaggagcgcaagcgcgatcatcatcgcatcaaaaattgcttagagaaattcttgacctgcataaacgcggctattcagttgaaggcattgcaatcgaaacagagcttgaaacccatgaagtagagcgcctgttggccccgtacgtttacaatggcacaaaagaaagaaagaaggctgcaaatgagtcctaaatcattgcgcagttttgcttgtggcttgctcgtagctgctgtggctcttggcgcagtatactttatccagggagacggggcctcttccgctgctgcaccagaactaactgaagatgagatgaagcaatcactcgcagaggcaggctatgtcatcgaacaacaagacacatgggatcagatggaaagcgatttacaagaagcacaagcttccttagaggatgcaacgcaaaacgaagatggggatagtgaagagcgaattgtttacagaaccattcttcatgttcaatcgggaatgacaagcattgacgtcggccaaatgcttgaagaggcaggcattgttgacaacgcacatgatttttttgatgccgtggatgaacgtggcttatcaaatgagctaaaaccgcaagtcaccggggaattatcaagtgaaatgagcatggacgaaatcttagatgaattgttctaagtacaacattcgacgcatcttacattcattcctttttatttagcaaatttcttatataaaggccagacaaggttgccgattttgtcggcaacctttctaactgaaaatcgagtaagtgtttttctagtataaaaatccagcgagctttatctgctcgctggatttttatttactcattttcaaacaaatcaacttcatccatgactgaatcgactgatttagggccctctcggttttcctgtaaatcaaagtagtcattgactaagtcttgggcaatgccttgagcaattttatacgatgttccccttggaatttgcacttttggagcgatgacagcaaaggcaatctctggatcgtcatagggagcatagccaataaagctttggttgtttccgtttaaaacttggcgattatcgccttcgccaatcgccacggaaatctcagctgtcccagtcttagcagcaattggcacatccgttttaattgagctagctgtaccgcggctgcctgtcaccacgcggcggaagccattttgcaccacgtcaagtttgtctttagacatgtcgacttcattaagcacttcaggcgcaaattcctttacaacggtcgcttcttctccattgatagaaggctccaatatttctttgacaagacgagggcgcatgcgcacgccatcattggcaatcgtgctcgcgtactggccaacctgcaacgtcgtataagtgtcgaattggccgatcataaagtcaagtgaagcccctggctcttgtggaacgccggtaatacctgttacttcatgaggaaggtcaattcccgtttgagtccctaagccaaattggctgaaataataacgtgaacgctctaacacatcattggcgacggacaggccaaacaagctacgttggctttgggggatgttgctgttgtacgtatagttgcccattcgcatcgcaatttcaaacatatagacgttcgaagaccgttctaacgcagtacccatattaacaggccccattgatgtaacggattttttctcaggcgtgccattaaaatgcaacggctggtcattaacaaccgtatcaggagtgacaacgccctcttgcatgccggttaacacggatgcccctttgacgacagagccaaactcaaacgcattgttcacagctccggttgggtgcaaatagctttcatcttctccggcaggatcgacaaaaccgctaatcgctaatatttcacctgtttttggattcatcacaatcgcataggcgctgccttcttgctgctgcaagtagtagccgcggtttttcatgacatgtttttctaccgcttcatcaagcagttgttggtactccatatcaacgcttaatactaagtcattgccacggctgccaagtgtttcttcgacgacgctttcggcttcctcgccgccagtccgtgtggatgtccgcgaaatttccgcttttgtgccacggagcacattttcatattgaagctccaaatagctgttgccgacaagatcagagcgggcatagccgtttgccaaataatcatcgactttttccgattggattgacccaacgctgccatacaattgccgcaacgtgtcgccatatacgtactcccttgtcgcatcccgctgcaagtcgatgttcggcagcttgtccaagtgctcacttaacacatgggcttcctcttccgtaatcgattgtttaattcgttgtggcgtgccgctagtaccgcggagcatatgtgtaaaaattgcaatgacttgttcttcttctttcgaatagccatcgaccatctcttctgtaatttcatctataatcgtttggtactcgtctttatcgtcgactttttttccttcgattaacgctttccgctctttttcgctatgagtgacataccaatattcttgtttgtcgcgaaaacggagattctctgtgtcgacttcaatgaaatcagacagctttatcgctaattcaagaatatcttcggctttttggttcccaggattggtgtaagtgacagacaactccatggaattgtcgaccaccacattgccgtagctatcatacatcagtccacggggcgcgtcgatgcgggccgtttggttcgatacatgtgttaactcttcttcgtaagattcgccttggactatttggaccatgccgagacgcaaaatcaatgcagaaaacaacaaaaacacgccaagaaacaaaatatttagcctggcggatacttggctgcgcgctttgttttttttctcagccatcatttcccctccatcatcatttatgtatcgcctaacagcttataaattttcaacacaaaaagacacccggcaagcggatgccttttctactctttacccgcgggtgccgttagcagtaaatgtttcatgaacctactctcgcaggtgggtgttcgcagttcacgttccgaagtccgaaccagtcggcatgacgtagagtcaatcatatagaactcccttttttacattcaaggttcgaaacataaaaaagcacacgaacatagcaggcaattcttgtttattataatatggacgacacaatctgtcaaaggccgagaaaaagttacaccgagcctccagcgctattttccccgtctgggtcccctgcatattgcacatggctaggctcaggatcttgggggcttaactgaatgtttcgcacaaaaaaatagatccataaatgacctgaaccaacaagaagcaatacagccggaatcgcctgtttttctggaaacaagctaatcgcagcaataaataaaagaatcgataatattctccctgtatttagcacacattcacggataatgatgtattcaacccgcaattccgctgcattgtacgaacggccaattacatcgtacgtaagcgaaatataagggatgagcagcaatggataggcgatggaaataaacacgccatacgtgatgagtttagcaaagcttaagtgaaacaggaggatgaaaatcgctccatataaaatgcaaccgcctactaatatggcccgctttcggaaagcgcgctttaacagccgagctgctaaataataaaccaccaactgcacactggaagtgacaagcccatatgtgccaagagcaagctcgttgccagttgtcacatatacccatacgacgatgacaaaagcaaacgtcccttcccgaaaaccttggaataaatgggcacaaagtattctcgcccaatctttgtttcggcgtcgttctttcaacacttcccctaattgtagctttcctttcgcatgccgtttggaaagccacattgttaaaatgacaccgataagaaatagcgtcaacgaacaggcaaaaatgaggaaatagccgcggtaaccagtcattctcgtaatgataaacccagccaacaatgggccggtcatcccagcaaaagaggttagcagccctaaaaagccgttaaaaaagtcgcgtgtatcgggctctgttacttcgaacgtcagcacattaaatgcaagccaataacaaccagcgccagcaccaagcaacgcaccaagcaaaagcaaataatcggcggcatgtgacccggctagaagcaccgtaatatagaaaagcgacataatgcttacgcctaggcgcaaaataaacacacggtcgatcctcttcgttagcttccctgcaaggataaaggcgagtggctgcaacatgacagacattaaattgtataaagcgaggtccataaatttcccagactgtttccacaagaatatatttacaaatgtattggaaagcgccacacttagcgcataaaggccgccaatgacaaggagcaatttcaaatcttttgatgcttctacatggccgaacactttatctgccaatttcttttgcatgacctcaccaccttagtcggtagtgtgatctgttttaatgcctgctatgcacgttttttctgcctttgcccaatgaaaaagccgcaaagcgaaatgcttcacggctcgttggcatgtatttattttgctgcttcgtaacgtttgctaacctcgtcccaattgacgacattccagaaagctgcaatgtagtctgggcgacggttttggtagttcaagtagtaagcgtgttcccagacgtcaagtccgaggataggcgttttcccttcagataaaggtgtatcttggttaggcgtgcttgtaatttctaaattgccgttgttgacaactagccaagcccatcctgaaccaaagcgcccttttgctgcgtctgcaaatttgtttttgaattcttcaacgctgccgaaagttgatttaatatcttctgctagagcaccagtcggctcgccgccaccatttggacttaaaatttgccaaaaaaatgtgtggtttgcatggcctccgccattgttgcgaaccgctgtacggatgttttctggaacagcatccaagtttgccaccaagtcttcaatgctcttctctgcaagggctgcatgcccttccaatgcagcatttaagtttgttacatacgtattgtggtgtttgccgtggtgaatgttcattgtcgcctcatcaatatgcggctcaagtgcatttgcagcataaggcaattctggtagtttgtaagccatgtttaattcctcctcagtttcaaatagtcttcgattctcaattagattaccattaaagacagcgctccgcaaagaaaatgctcgcgctttctcatttattttttattccctattcccttatcattaaacataaaaaaaacgcctttttatttaggcgtttttttaaaacggaggaagagggattcgaacccccgcgcggtgtgacccgcctgtcggttttcaagaccgatcccttcagccagacttgggtattcctccaaagtggaccctgtaggactcgaacctacgaccaatcggttatgagccgactgctctaaccaactgagctaagggtccgcaagtatgttttaaaatggggcggctgatgggaatcgaacccacgaatgccggaaccacaatccggtgcgttaaccacttcgccacaaccgccataaaagcttgattcgttatgtatagatatggtagcggcggaggggatcgaacccccgacctcacgggtatgaaccgtacgctctagccagctgagctacaccgccaatggctccacaggcaggattcgaacctgcgaccgatcggttaacagccgatagctctaccactgagctactgtggatcgtcttccatactcctcattcggacaaaaattatattaccacgtttttctctttgatgcaacgattatttaagaaaaaacggccggcttttacttccggccgttatataggctaatcgccaattaccgattgggcaatgttgaccgaatggtcgccaattcgttctaaattgctaataatatcgacaaagacaatccccgccgaaccagaacatttgccctcatttatccgtttaatgtgttgttttcttagctttctttccatgctatcaattaaatcttcatgttttaaaacgtcatgggctttatcaaggtcatcccgttcaagggaatccattgcttcttctaatgtcgaatacgttaatttgaacatctcgtttaagtcatttaaggcaatatcgctcattttaactttattcgctttttgataatctttcagttcaacaatgttttccatatgatcgccaatccgttcaatatccctaacaacatttaatagcgttgaatggagattggaatccgtcggcgacaaggaacgtgccgacactttaaccaaatagtcggtgatctcgcggtctaaattgttaatcgcttgttcatactggagtgccaactcggcgtccttcttttcgcctgtttccatatagcgaatcgcttgctctaatcccttttttgagtaatcggccatatggataatttcttgtttggcttgtcctaaagcaattgctggcgagtttccgataaagatcggatctaaatgttttggtttgtaatctaaagcaagttcatctcctggaacaagcttcgtaacgatataggccagtaaagcgatacacggaaattgaatgatcacatttgcgacattatagacaccgtgagctgatgcaatttgcatggaagggcctaaattgaattgttcgcctaaaaaagcaataaagtttacaaaaataggaaacgcgatcatgactaacaccgcaccaatgacattaaacacgacatgggtgagcgcagcccttcgtgctcctacagtcgcaccaatcgcaactaatacagctgtaagggtagtaccaatgttgtcgccaattaaaacgggaagcgcagcttgtagttccattgctccttgctcgtacaattgctgaaccagaccgattgctgcagtcgagctttgcaaggcgacagctaaaatcacccctacaatcactcctaaaaatgggttatctcccatcctaacggtgaaatcgacaaatggttcccaattgctaagcggccgcaagctacttcccataagatctagaccataaaaaagcccgccaaacccaaacacgatctgaccgatatgattgacttttttctttttgaaaaagaaaattaaaaaggcccctactgccataatgggcaagctgtattcttttaaatttagtccaataataaaggctgttgttgttgtcccaatatttgcgcccattataacagcaatcgcttgcctaagccgcataaagcctgcattcacaagtccgatcgtcaacaccgttgtcgctgtgctgctctgcagtaaaatcgtgacgacaatccccgaaattagacccataaaaggattcgttgtgtatttgtctagcaaatcccgcaaccggtctcctgctgtcttttggagtccgtcacccatatacttgacggcaaatagaaagatccctattcctccaagaaacgtaaacagcaacgtttgaaactctcccacgcatctcatcccttcatccaactcatttttgggcgtctttcgacaaacctcaacattatggtccgtgtctattattaaacaattattgagtatttgtaaatgatatttaccgtttcttaatgttttctttacaaaacgaaaaaatgagtggctataggcacctaacttgtcgttataatatgtgatttgtttagtcttatacaaaaagacagccaataaatgaaccgctgcttggccacatggtcagcgctgacgtttcatttattgacttgaaaggatacaccgtctgtgattgcatgataaaaaaccggaataagagcaagttcagtcaactggcctttcaggtctcactcccttttgatcaaccatgtactggacgtgggtatgcctttattgggacgtttcccatcggaagacttcctccctcacacgtggcgccgtttcttttccgaaaagttcaattgccttcatgacatcttcatggggcatcgaaccgaccggcacatgcagcataaatcttgtaattcctacatatttacgcaggtgaataatcttttttgccaccgtctcaggatctccgacataaagagctccctcaaagctccgtgcagcatcaaagcttgagcgggtgtatactccccagcctctctcccgggcaagcgtattcatcgcctgctgggtagaaggaaagaatgtgtctgcagcagttaccacatcttcggctataaacccgtgtgaatgagaggcaacttggagttttaaggggtcatgtcccccatgctcagccgctttataataaagttccactagaggagcaaactggagtggatttccaccgatgatcgcgaggacaagcgggagaccgagaagccctgcgcgaataacagattcctgattgcctccgctcccaatccatataggcagtggattttgtacaggccgtggatacacacctaaattttgaatagctgggcgatgtttgccgctccacgttaccctttctgactgttgcagctgcaaaagcaaatcaagtttctcttcaaacagctcatcataatcatttaagtcatagccaaatagcgggaacgactcaatgaaagagcccctgcctgccattatttcagcccgcccatttgaaagtccgtcaagcgttgcgaaatcttggaagacgcgtacggggtcagcagatgaaagcacagtcaccgcactcgtcagcctaattcgttttgtttgcgaagccgccgcagccaatacgacagcaggggaagaagcagcataatcttggcgatgatgttctcctacgccgaatacatcgagtccaaccttgtcagcaaggactatttcctcaacgacttcccggagtcgttgggcatggctgattgtttcccccgtctttatatccggagttgtttctacaaaggtactaatgcctaattccatcgtctttcctccatatttactttccccctcgctgccgtgagacaagcttcgccttactggtgatccttactttgatttgcatcttcattctccacttcgacggctttgactaaaatcctcgttccgtcgacggaaaccacttccacttctgtatcggctttaatccaacggcccccgcttgttgcgctgtatgggttcccctcaatgtcaatggttccagtaggacgaaagtcagtcaaagctattcctttttttccaacaagttctttgtagctttcgttcatagagttatagcctttttcagaagaaagttggtcttttaatgtcattttcgcccacatattccgatggggaaaaacttttaagaacaaaagagacgcaaaggcaccgattacggtcgcaaatgaaacaagcacgccataaacgaaatctggggcagggatcgctaggccgacgatcattagtataaccccaatcgcagcaattgttccgtctgatgtcacgttgccgtcaaagataatgagtccaaggccaattaaataaaaaacaattacccaagtgccgacgtccccgtttaaatggtaaataaaatacatgcatattaacccaatgccgagaaggccaaatagaccccttaccctaactagcaattcgccaattaaaaataatgtcccaaaagcaactacgataaatccaatcgaagctgaatcgagccaatcaatcataaaatcgacctcccaatcatcacttataccttttctacgtgcagcccttcaaaaagtttcatgcccataataataagagaggagctcactcctctcttattatgaacgaaataggtcagcaatggaatcaaaaaagcgtttcattgcatcaataaaactgtcgaggaatgattttgcctcctcgctttcgacaaaattgccaaagttctcccttactttcgatagctgatcctttaagtgatcccaatcaatatcaagatctttcattttcataaataatgctgtaagttcatccgtttcctgatccgatagcgtcacgttaatttcatcggcaagcttaataataatcgttcgcatttcctcttctgttttaatgtcggtgctagcaatttcttctttcactcgggtaattaactcattggcctcttcgctgccaatcgattcagctagctctgctgttcggatcatttcctcattggcaacggtcttttgttcctctggaatatccaagtcagcagctgtctcatatgctttaatcaacccagttagagcagccgtacctgaaacttcaaacggagctgtgacatacacttcagcgtcttgtacgccagctgttactaaagcattggcatacatttcattcgaaacccagctaattcgatcagaagtcacttgtatgccagtgccagcaggggcaattgttattttcgatgaagacaaggctttattgccgatttggctggcgctaatatactgacctaagtataagtgctcttcttcattggttacataaatggtttcatactcatcaggcagttccatccgttttaaaacatccttcttctgctcctcagacaagttttgtccaagggtgactatcacatcaccagggacggcgtctgcaaacgctagttttggcataaaggaaataacaagcaataacgcagtcaaagcgatgcttattttctttaatgttgttctcattaaactgatcactcctgttcgtgaggcagctgtttttacagccctctcaaataggtaacctcttttttgttcatccgagaagggtctaaagtcctggttcgctgcttaaatttgtgtgatatgttggtttttttccctgtggaggcatattcctattataagggaagccgccaaaacggcaactaggctgccaagtgcaaccatgccattgcctatccacatttgataaaaaagcggcgctgccgcaatgcttaaaaaccttgccatcgacagatatgcaattaaacgttcacggacagcccctgccgtcttctcccctaaggcattgcttgcaaggggcaaggcgacccctgtacatccgccacaaatcaaaagtacgatacaaagtacaattgcttgctcactaaagaatagcagcaaaagtgtgcaacatagcagcaaacttaacagtacgccacgtattgctgtttgacccacgttggcaacaaagcgaatattcgctgagcacagcaccattgccaaaaacggcagcgctaacagcacaccccgaacggcaggagaaaaaccaaatagcgagaataaataagaagcataaaaaaacaaaccatataataaaaacaaatgaacaaggcttaacatatactcagaggcggcaacgaaaaaatagcgccggaaagagcgttgtcccacttttggattttcccactttagcggcgcaatattgcgccagacaaaaaagatgctgccaacagccaataagagaaacaggtatgggcttagtgtccaagacaaatacaatagcaagctcccaattagtggactgcttacttttgcgatgccattgctaagttcaagccgcccaaagagaaccaacttttcgttgccttttgcaaaagcgcctgcatatgtgtaagcaagagaagttgcgccacctgctcccatcccggaaactatccgtccagcaaataaaagtgtagcagcctcattcatttgggcccatacattgacaagcgaccctaccatgactaaaaaacagcttatgaccatagccttgcgaatattcgtacgccgggccaattgttgggcaaatggaatcgccaccacacctgcgagcgtaaaagtgcttaaaaaccacgtgctttccgtttgtgtaaatgcgtatgtttgttgaataacgggcaaaagcggcacatacatcgaattccctaagacgatcagtgtcggaagtaaaaacagccctgaataatcattctttttcattagagccctcacgaatgaatagattttaagcaaacgtccattctataggttatacatattgaagccattcatgcaaaaaggaggctgcgctgtgaaacggatcttttacgggattgtcttgattattgttattcttggcatacaccatgatttaactggcggcacgtttgcagaagagaaagggactagtacgcctcctgcccctttagccgttcacgtgaaagaggatcaaggagaggatgagccatccctcccctatcaagaagtgattattgaaccagggcaaactgtcctctctgtcgttgaacatttgcatggccgccaagtcgaccgtccaatcgaatcaatcatcgcagacttccgcgaattaaatgaacaaatggagccaaacgcgcttcaagtcggccaccgttaccgatttcctttgtatgatggtgaacctgagtgaatatccttgccagccctagttaatcattgatagaatagaacagactccataggagacaaaagatgggcacaactgcccctcaaaggagcgattaggtctatggccgagagagttcaccgcaaaaatacgcgccctgttaaggtaggaaacctgacaatagggggaaatgatgaaattattatccaaagcatgacgacaacaaaaacgcatgatgtcgaagcgactgttgcggaaattaatcgattagaagaagcgggctgccagattgtacgtgtagcttgtccagatatgcgagctgcagaagcaatctctgaaataaaaaaacgcatcaatatcccccttgtcgttgatattcattttaactacaagtttgcgcttaaagcaattgaaggcggcgctgacaaaatccgtatcaaccctggcaacatcggcaagcgcgaaaatgtagaagcagtcgtaaaggcagcaaaagaaaaaggcattccgatccgtattggcgtcaacgcaggctcgttggaacgccatttgcttgagaaatacggctatccaactgctgacgcgatggtcgaaagtgcattgcaccatatccgtattttagaagaactcgatttttacgatattatcgtatcgatgaaagcctcggatgtgcgtttagcaatcgaagcttatgacaaagcgagcagagcattcgactacccgctccatctaggcattactgaatcaggcacgctttttgccgggacggtcaaaagcgcagctggaattggtgctcttctgcatatgggtattggcaacacattgcggatatcgctgtcggctgatccggttgaagaagtaaaagtggcacgtgaacttttgaaatcgtttggcctagctgctaatgcagcgacactcatctcctgcccgacgtgcggccggattgagattgatttgattagcattgccaacgaagtggaagaatacatttcaaaaattaaagcaccgatcaaagtcgctgttctcggttgcgccgtaaatggcccaggcgaagcccgagaagcagatatcggcattgccggagcacggggcgaaggacttttgttcatgaaaggcgagattgtccgtaaagttccagaagaaacaatggtggaagagctaaagaaagaaatcgataaacttgcagaagagcattatgcaaaacaacgcgaagctcagccgaattaaaccatttaaaagccgactcgggtccgagccggctttttcgtttaaaaaaagggtgaaaagataagcgtagagagaacagaaacaatgccgattgcggtggcccaaatgcctaaccctcttgcccctcttgaaatggcaacagcgccgcaaataatgccggctgtccctaacaataatgggacaagaaacaaggaagtaagcgagaggacgagcgctaacgtacctatccctttccccgcatctgttcggtctgtctcttcttctgtatcttgttctcgcaacctttcgtccgccgaaaattcacttgccgtttcctcgttaaaacggttttcatcctgattgtccagcaagtagtctgagccttcttcgccatcatgaccatccacatgcgtatttaaaaaggttagcgacggatcattttcatcgactagtttaaccgtttctttctgtttgttttctgccaaaatgcttcccccgctttcttatgaagattgtcgttagtttgccgtaaaaggaaacgatacatgctgccaagtattactaaaagaggtgtaattgtaatgaaaaaacggattggactcgatattgacggtacgattacagacccagctacgtttgtcccttatttaaataaagattttaataagaaattcacactagctgatttgtctgaatacgacttgactaaaatccttcgcatttcagacaaagaattttgggattggatggaaataaatgaacctacaatctatgctgaagcagagctcgcttatggtgccaaacaggcccttctaaattggagtaaagaacatgagctcatttacatcacagccagacgtaaacacttaacagacgttacgacctcttggttcgcgaatcgccaagtgccttatcaccatattgaacttgtcggcaagcatgataaacttgaggccgttaaagcgcaaaagcttgacgtttttcttgaagacaaacatgataatgccgtcatgatatctgaagaatttgcgattcctgtcctcttattcgatacgccatacaaccaaatgccaaccccacaatctgtcgtacgcgtgcgaaactggcaagaagcatatcattggatggaacgctggcttaaaagcggggaggcgtttcctatataaaagggggcttgcttggcaagcccctcagactgtagtcactcatatgctttgaaacggtcgtttcatgcgcaagaaaaccgctgctcatgaacccccgttctattcgcatcttccctcggccgcactcctcgtctgacaagcgtttgagcggttattgacttagttggtaagccttagtgttctttttttggtttgaaggtttggcaacacgtctctgcgctttgttcggcatgttcgtgtacgtcctcttttgcatcggcatgccattcactacttgcctcgatatcatagtctgctgcgtaaggatcggtttccacaagaatttcttcagcgccgcatttgtttccctctgcccaaaaggtgcagttagatactcggcaatggacaattggactcattgattatcccctcctgctcttagctttcgcgctaaaacaagccggaatacatggcaacgcttgcctatttcttaaacgactttcctcccaaacgtaaaaaagcttaagggctctcccttaagcttttactgctggcattgttcgcacatgccgtatatttcaaatttatgtccagtaacatggaaatggggaaatcgttttgcaagcgactcgtccattgggcaattgtgaaaatgctctgttttcccacactctaagcagataagatggtgatgatggtccgacgtttcgcaactgaatcgaaaacgtttttccccgtccagctctgtcgtttccaacaaaccaatctcagcaaaaagggagaggttccgataaatggtatcgaaacttagtcctggatagcggtcttgcattgcttccaacacccctcgtgcacttaaataacgggagttagccgcaaacagctttagcatctcttcccgcttgcccgtatacttatacccttcttcttttagacgattaagtgcagttgatacatccatgcaatcgaccctctttttagactttcttttagtttaacggatttttttaagcttgactaggtgtgtttcccctaccgaataagaataagccttttttgcgatttcgcccaaatgctagtgacaaaagcaaaatgatgacagcaatcatgacaatcgccccacctggtgctatttgcagttggtaagcagcaattaaaccgccaatcacggccatttcgccaaaggcaacagcaaacacaaacaattgtttaaaccctttagcaaaacgcatggcgctcgcaacaggcagtgtcataagcgaggaaacaagcagaatccccacaacccgcatcgaagcggcaatcacaagggcaaccattaccataaacacgagatggaccaggtgccggttaattcctgaaacaattgcttgctcctcatcaaacgacaaaaagaacaattctttataaaaaaggatcagcacaacaaaaacgacaaccgttatgatcgtgatcgtaataaagtcactgcgattgacggcaatgactgaaccaaacaaataattgagcaagtcattgttaaagccattggccaaagaaataaaaataaccccaagaccaatcccagcagacatgataattggaatcgcgatttctttgtaatggacgtatacttggcgaagtttctcaataaaaagggacccgcctacagaaaatgccattcctaagtaaagagggttcgccccgctcataaacggaaagtaactgccaagcaataagctaaatgtaattcctgaaagggtgatatgtgatagagcgtcagcgatgagcgacatccgcctgaccactagaaatactcctagaagtggggctaacacaccgatgagcatccctgtaaaaaaagcatatcgtaaaaaatcataagtcaagaacgcgctaaacatgggcaactccttcatggttatgggttagaagttgaacgtcatgcccataaaattcaagtttatcgtttttggcaacaaattcatctgacgtcccatgaaaatggattgttttatttaagcaggcaacttcgtttacgtattgcgtcattgctccaatatcatgggaaatcaacagcaatgttttcccgtcttctttatgcagctttcttaataacccataaaaatcactaacacttttggcatcgaccccaacggtcggctcatctaaaataaggagttctgggtcgctcacaagggctctcgcaataaagacgcgttgttgttggccccctgacaattcaccgatgttttcatgcatatactctgacatgcctacttggcgaatggcctcattaattttgtctttatcctgtttgcgcaaaaagcgaaacaacccgactttggcgtacaatcccattgacactacttcaaaaacagtcgccgggaagccgctagaaaagctatttgctttttgggaaacatagccgattttatcccattgtttaaacttgtcttgtggttgattgaataaagaaatgctgccttcatctgggcgcagaagcccaagaagcaattttactagcgttgatttccctgacccattgggaccgacaatccctaaaaaggcgcctttttcaattgttaacgaaatattgcttaaaacgggacgcttcccgtaatgaaatgatacgttttttaactctgccagcggagcatagcggtccatgttttcaccgtcctacttattcagaatgcttccgatttaatccttctcctattataacgattattttttaaatgtctagagaaaaaaacaatcggttggaccattaaaaaaagagcgctaggcgctctaagactgtagacaaacgctcgatacgtcgttgttttcccgctcgtgtgcccgatacatacgtttttcgtcctttccattcgactcatgttgcttgttactcatcgcctgcgtaaacgacggcaggtgctccatgtcgttctgctgccgtttggatctttaccgcgtaactgctttttgcatcgccgttttcattgatatacgattctaaaccacccatgccgcggttataagcagtcaatgctttatcccaatcgccatattgatcataaagaaaatccaaatattcaacggaaagctgaatcgcgtagaatggatcaaaaagcagttcttggcgatattctacgccagccatttcagcaatccacggagccgtattagtcataaactgcgccattccataagcatgaccatattttgtctttggaccgaccgcatttgtatcaaactgttctccgctctcaactttgagcaattcatacacaaggtagggattcatttgcttttgttctgctaaatgagctaaatacatcccccactcttttttaaaatggccatcgctgtcttcatataattcatccgcaagcttcattgcttcggaccagacttgatgattgtcttcaaatgacaattcttcggcaacagcacctgtttcttgcaactcctcttccatcgagccaaaaagctgtctcatttcctcattttccttggccagctccttgtttgtttcgcggtaatcatgtataagtaaaaaggcgccaccaactaaagccgctaaagcagctgccaacagtactttcattgttcgcttcacactgtctcactcctttgttctttgaacgctgaaagcataagcgattgcgccatcaggaacaaggagacaaacagtggctagaagcggcaaatacctaaaaatcaattaaaaaccttgcatttcctccacaatactctctcaaagggcgaattgctgccttatttcacttgatccgcgccaataaaaggctcattcaggctcgaaaaatgattggaacaaaaccaataaatatccttttcaaactaataatggcaatatcatctcaattcgcgtcccaacattggcttcactctgaatatcaaatgtgcctccatggtcttcaataatctttttgcataacgggataccgacgcccgtgcctttttcttttgtcgtaaaaaatggttttccaagttggcttaaaacagtatcaggcatgcctttgccattatcgatcagctcaataacgacttgctcgccaacttccctgcttcttatttccagccgccgtccagttgactgctcttcataagcttcaattgaattgcgcaacaaattaagcataacttgcttaaacatcgattcgtttacatggcatatcgcaaacgtttcttcaatgtcaagttgaaattcaacactgtgcagagagcattctgcccgcatcagttcagcaagtgattggagcaactgtgctggcgattgccatttacggtcgttctttttgcgtgaaaccgatagaaaatcttcaataatgacattcatacggtttagctctgaaataatcgtattgtaatacttctgaaaatcgctcgtcaaatgggataattgcaaaaaacccttaatgacagacaacgggttccggagctcgtgggcgacactggcagcaatatgcgatactgcttgcatttgatgttgaaatgtgactaattcctcgaatttccgtttcaccgtcaaatcttctaaaagcacatagtacacaaaagcatacgtccctctctcaggaaatacagtcactttgattgtcgcatcgtcatcttcataacagtttttaacaatctggttgcctcgcccgactgagatgcttaattgttcattaataaaatgcagcaaatgatcagaaacgcctaactctgccagtgtttgttcttcaaggtctttttctgccaaatcggtgagatgaacaaaggattcgctccagtggagctgtcgaaagcactcgtctacctttaagtaaggaatatccattgctttaataaaagaaaacattgaatgtgcgacgtcaggcggttcttttatgtaaagtaaatggtcatcgtgtacatctacgctttttgccatttgccgcacttggttactccctataggggctgctttttgattttgggaaagcttgcacatccttgcccctccttcttcagtagtgatccttatctaacaaccatggccgtaaacattccccgctactctattcttattcgagataatggcgttttttcctgtttttgttctaattaaaattcccgatcatatagtaacaagactttctttataaagggggcggttttgcacagtgaatatcattatgcagcagctcattaaccaaaaaatcaattcgattactgaatccgaatttattcaattagcgcacaaacatggttaccaagtaacgccagcacaaacaaaagcaattttcaaaatcataaaggcacaacggatcgacatcggaaaccgatcacaaatcgaccaaattttagagaggctgcgaacggaaacagacccgtatattgccggtgttgtcgacgaattgtttgagcaatttcaacattatttggattaacacaaaaagctcacgtcttatataagaacgtgagcttgaaacattttggccacaccgcctattaaaaaatctttgtgttgggaactttatttttcaataggttctagcaactcccggcgcaacaacgcaatttcatgtttgtatggaggccttttatctttcttgtctttgcctatgaaaggcgtttctagaattttaggaatgtctttaaattggtcatgatggacaatataatcaagcgctttaaggccaatatggccatggccaatgttttcatggcggtctttccgagcactgcgttcatttttagaatcattgatatggacgactttaatccgttctgctccgatgatccggtcaaattcatcaagcacgccgtcaaaatcattgacaatatcatagcctgcatcgtgcgtatggcatgtatcgaaacaaaccgataaacgctcattgtgcgtaacgccgtctataattttagcaagttcctcaaacgtacagccgcactcagaccctttcccagccatcgtctcaagagcgatttgtacatcgcgcttttcagtaagaacttcgtttaaaccttcaatgatctttttaatgccttcctctgcccctgcacctacatgagcacctggatgaagtacaatctgttttgcacctatcgcttcagtgcgttcgatttcagatcgcaaaaaatcaacgccgaggcgaaaggtttctggcttttgcgtattgccaatattgatgatatatggagcatggacgacaatgtttgataggccatgctccgccatatgggctttccccgcttcaatgtttaaatcctcaatcgctttgcgccgtgtattttgaggcgcccctgtataaatcatgaatgtcgttgcaccgtaagaggctgcttcctcactcgattgcagcaacattttctttccgctcatcgacacatgggaaccaattaacaatgacatgaaatctccctccgtattatttctctttacgcgcgtttaagcgtctctcccgttttttctgtttggcaatagcggctttcgctttttgtttatacccaggctttacttttttaggcctagcttttgccttgccgccggtccgaatgggccgattacctgtttgcttttcaacagtagctttccctttgtctgttggttgctttcgattgatccgacccgctcccacaggaggcttaacgagctctgtccattcaccatctttgaattccacaaatgaaaaaacaatcccccgactggcaagcttcgcacacgccgcttcatcactttgctcatacagcgacaaggcaatgccgtctgcgccagcccgcgctgtccgaccgacacgatggacataaaaatccaagtcttgtggaaacgcgtaattgatgatgtgtgtcacgcctttaatgtcaatgcctcgcgcagccaaatcggttgcaaccaaatactggattgataaatcctcaacccgtttcattacttttttgcgttcccgcggtgccaggccaccatggaggcaatcaacaagtatatcctcagtagctaaagctgctgtcacttcgtcggcttgctcttttgtattggtaaagatgatcgccaaatacgggtttaagccgcgaatagtctctttcaacacagtcaacttgtcccggtggcgcactggaacaagctggtgggtaacacgctctgccgccagcttttctggttgaacatgaacatgccgtgggttattcatatatttttttaaaaatggttgcagcttttcaggaacggttgccgaaaagacaagcatttgcaggtcctcggctaaccttccggcaaccttgtccacgtcttctaaaaagcccatatcaagcatctgatccgcttcgtcaacaacaagcgtcttagccgtatatacaagcaaggaagatgtattgacaaggtcagcaatccggcctggcgtgccgatgacaatgtgcggttgcttagtggacaaccgctgtgcttgccgttttctgtccgtgccgccaacgaaaagctgcgcatcaacttgcccgtcataatagacaatcagcttttttaactcatcaaataattgggcgcaaagttctcgtgtaggggcagtgatcactgcctgtacctcgttttgctcgatatcgagctgttcgatgatcggcagcaaaaacgcaaatgtttttcctgtccctgtttgcgactggccaatcacatcttttcgatttaaaatcgctggaatcaatcgttcctgaatctcagttggccgcttgacgccaatagcgctcaatcctttgagcagtcgctcgtttaaacctaaacggctaaaatgttcagcattcatttttaactcctactttccgttcgattgcaatacttcattttaccacactggcatgtaattcgtccatttgcatttaaagacacgatttatacgactgctgcataggttgcaggtaagagactatataaagatgggggaaaattgacatgcactcttttttaggccctcctgcaagttcccttccgatgcaaccgttcccggcaacacccaatcctttttttgggcctagctcaatgatggggtcaggcatggcaccaagattggtccagtctgccgcccggcctctggcaaccattcctgggcaggtggcgccttcctttgcgacgcaaagagtcggcggtggtttattatcgcgcttatttggcggcgccgcctctcgtgttggcgctggcagctttacagctggcagcaggttgttcggtagtggcatgaacttaaccacgatcctgaataatacgcaacgtgtgttaggcatcacccaacaagtcgcaccgatgatccaacagtacgggccactaattaaaaatgcgccgacgctttggcggattttgcgttcttcttctcagtcggcagatgaagatccaacaggcacggaagaaacaatagagccagaagcccaatcgactggcggtgaagaaacagccgaactaaaaaccgcttctgctgacagtgaggaaacagaacgacaagttgacgtcgaaacgcaagccaaacctttagacacagcggtgattgtcacaaaaagaaagaagcctgctggagatgaacttccaaagcctaaactttatgtgtaaaaatttcattttggttattgacaagtttctgcccacagtagtataatttgaaatttatctttaaatgtggtatactgacttctatcacttgattggaggaatgtccatgtttaaagttggcgacaaagttgtttacccctaccatggtgcagggacgatccaagaggtggaggagaaagatgtattgggtgagacgcatttgtatttcatccttcatttcccattggtagatataacgcttatgcttccagagtctcgaatcgagcaatcagggctccgaaaggtcattccctcctctgatcttgaaaaggtcgcaaaagcattgcaaaacgggcctgatacgccgccttcaacgagtcaattttctcgagatacggaaaatttattaaagacaggcagcattatcgacgctgctcatttagtgtcgtcactctcgaaaaaacaggcagaacggtcaaatggactccatatccaagatcgccatcatttgcaaaaagcacggcaagtgttagccagcgaacttgtagccgtccaagatttttcggaagaacaggcctatgaatttattgacaacaatttgctcgataccgctaattaagccattattgttcgacgaaatcataaggcttcctgattgtcaggctcattgatctccattacaatagaagagaaatcatcaaaacagggctctcactttttcagaaagtaagcagccccgtttttttaggaggcctctaattaaatggacgttttaaaaatttcgccaagaggatactgttacggcgtagtggatgcaatggtgatggcgagacaagcggcgcaaaacttggacttaccaaggcctttatatatattggggcaaattgttcataatcaacatgtgacggacgcttttaaagaggatggcattatttcattagacgggccgaaccgccttgaaattttaaaaaacgtcactcatggaacggtcatttttacagcgcacggtgtatctcctgaagttcgccgcctcgctaaagaaaaaggactgacttgcattgatgcgacatgcccggacgtgacgcgaacacatgatttaatacgggaaaaagcagaagaaggctatcagtttatttacatcggaaaacaaggtcatcctgaaccagagggggcaatgggtgttgctcctgactctgtgcaccttgtcgagacaatggaagacctggagcagctgacattggatgaccgtgacattattattaccaaccaaacgacgatgagccaatgggatgtagccgatattatgaagcgcgctatggagctctatccaaacgcagaagtacacaatgaaatttgtttagcaacgcaagtccgccaagaggcggttgcggaacaagcttctcaatgtgacatcgtgattgttgtcggcgatccaaaaagcaacaattccaaccgattggcgcaagtttccgagcaaattgccggtacacccgcttaccgtattggcgatttgtctgaactaaagctagagtggatcaaagaagccaagaaagtcggtgtgacgtcaggcgcgtcaacgccgacaccaattacaaaagaagtgataacctttatcgagaactatgacccaaatgatgaatcgacatgggacacggcgaaaaaagtgccgatcgagaaaatccttccaaaagtgcgtgtcaaaaaataacgttcaacaagcaagcgacgcgaaagcgcggcttgcttgtttttttattctcataaaaattgaaaaggctctgtgctctgggcagaagcgaatatatcaatgtggtagccgttttcgctcaataatgctgcaattttctccgcaacgccttctttcataatcgcctcgatatgatggccagcatcaatgacacacatgcctgccattaatgcgtcttgagcaacgtggtaatacaaatctccagtgatgagcacgtctgcgccagctcgtttggcttgcatcacatacttattgccatcgcctccgagcacagcggcttttctaattttcgtatccaactcaccaacaacacggaccgtttttacacctagcgcctgtttaacaaattcaacatatgaggctagcgtatggtcgccctccacttttccaatacgaccgagtcctcgttgaaattgtggttgatcaagtggatacaagtcgtaggcaggttcctcatacggatgcgccttaaccaaagccgcaatgaccttgccgctcctattggcaggtacaatggtttcaatgcgtacttcgcctacttcttcttctttccctatcgtgccaatataagggtttgttccttcttgtggacgaaaacgcccaattccctccgccgaaaaggaacagtggctatagtggccaatgtggccagcaccagcagcgccaagggcctcacggatttgtttcgcatgggaagccggaacaaaagcaacgagcttttgcaatgtttctgtataggtcggcgccagcacattgctatctttgatttgaaggcgttctgcaagcaaatcattaacgcccccttcggccacatcaagattcgtatgggcagcataaatagtaatctcatgttcaattgctttttttatcattctccccatcggcgtgtctacatcgatttgtttaagaggatggaacaacaacggatggtgggccaggataaagtcaacgtccttttcaatcgcttcatcgatcgttttttccagtacatcaagggcgaccattgcttttttgaccttttttttcagtgacccaaccattaaaccgtttttatcgccttccagcgcataagactttggggcaaacgactcaaagtattgaataagcgtatttgctgcaatcgtgtttttcattctcccaatgcctccttcacaagctgcaactttctttcaagctttctttgtttgtcgctcatttcctttgtctgtttccctttttttagttcctctaatacttgaagccagctttgttgttcacggcgccactttttttgaaaagccgaccctttttcacgccgcaaaatcgggccaagcagcaagtctgcttctgtaagagacggtgtgcctttttctggaaccgccacaataatttcatatattttgccgtcttcttctatgatttcttcggctgaaatcgaaaattcgtgatgtgaaagccactcccgcactgcatgggcggcgatattgggctgaagcacaagggtttgaacacctcgcaactttgttttgccctcttctaagatcgaagcaattaacggcccacccatacctgcaatcgcaatagcttcaaccttatcatcgcttctcagtacttctaagccatttcctttacggacttctaccgcatcagaaagacctgagcgactcacttgcgcacaggccgattgatacggcccttcattcagctcaccggcaattgcagtcaaaccggggcaccgcaatgccagatagcaagggaggtacccatgatcggatccgatgtctgctatgcgcttaaaatggtataggtgagaggctacccgctcaaggcgcaaggatagctgtttgtcattcattttggaacccccaatgtatacggattgcaataaatctctaaccgttcctaagaacgctaaagcgaaatggaaaaagagcaaggtttcccctgctcttattgggaagcgtcaagcaaatactctgctacggcttcaatttcattctcttgcaattggcctccgaaagccggcatgccgccgtctagcccattggtgacaatttcaacaatttcttcatgagacaaacgtccctctaaattattgatagccggagcatttccggtgcctgataagtcattggcatggcaggcaatgcacgattctgagacaactgtttcgccgtattcgattggatcatcaatcacgacttcctcttgtgccccttctccgccttcctcagcgatgttgcgcatatggttgccaacagctgaaagcgcaaccattaaaacgacaccaagcaatgcaataatggcaaaagggattaatgggcgtcctttcattaacagtgctctcctttctaagttagaggtctttttcttatgtaaaaaagcacgaatcttctttagtttactgtatatggacacttctgaaaagggctcgtccctattttaattgaaaaaccaacaatttgccagatgatactattaagaaaatttcaaatggcgatttgcatttccctttcatacccagtaaaataggaattaagcaaaatagaatcgtttggcttgcaaaggggcaagccaaacgatcagcgatctctttaattaatcaagaaagtcttttaaacgcttgctgcggctaggatggcgcaatttacggagcgcttttgcttcaatttggcgaattcgctctctcgtaacgccaaacactttgcctacttcttcaagcgttcttgtccggccgtcatcaagcccgaaacgtaagcgcaatacgttctcctcacggtcagttagtgtatcgaggacgtcttcgagttgttctttcagcagctcgtacgcggctgcatccgatggcgctagagcttcttggtcttcgataaagtcgcctagatgggaatcatcctcttcgccaattggcgtctctagcgatacaggctcttgggcaatttttaaaatctctcttactttgtcggggcttaaatccatctctttgccgacttcttctggggttggctcgcgcccataatcttgtaaaagttggcgctgtacacggatcagcttattaatcgtttcaaccatatgcacaggaatgcggatcgtacgggcttggtctgcaatggcccgtgtgattgcttggcggatccaccaagtggcatatgtgctaaatttaaagcctttgtcataatcgaacttttcaacagctttaattaaacccatattgccttcctgaattaaatcaaggaatagcatgccgcggccaacataacgttttgcaatcgaaacaacgaggcgcaaattcgcttccgctaaccgttttttcgcctcttcgtcgccttgttcaattcgtttagccaaatcgatttcttcttccgctgaaagcaatggaacacggccaatttctttcaaatacatacggactgggtcatttattttaatccctggagggacgcttaaatcatttaaatcaaactcttcttcgtctttggctacttgtgcaagcgatggcacgtcgtcttcactttcgttcaaaagttccacgccttgttcaccaagatactcgtaaaattcatccatttggtctgaatcttgttcaaacgcagccattttctctgtaatttcggcatacgtcaatgtaccacgttttttcccagtttccaccagttgttcttttacttgatcgatggtaaggtcaccttctgttacaggacgcaacggtttgtcagccattcgatcccctccttccaaaattaaaccatacattactggctttggagctctttttttaagcgaatcaactccatttgcagttttgccgcccggattgggtcttgttcaaaccgcgcagcctgctgctgttctttcagttttacccattttgggtattgctcaatccgctttatataatcagcaagctcctcgtctgaacactcattttttaatggttgcatgagcaaatatgccgccagctttgcaagccttcgatcttcaaggctttctacaaaacgcttcatgctcgcatcaggctctctagttacaaatgaaagcaaataagcataaagggcttggtgttcttcgaggttaaagccagttcctagcttttctgagacgcgccacaccatttccgtatcttggagcatataagctagcaagatccgttcggctttgacatgagctggtacaggccgtgcgcttccttgctttcggccggaagttggcttttccgctcgcggcagcgctttaggtgtctcttttgtttgtttgagtaggcgttcggcccggcttaactcttggcgcaacacatccatcggcagtgtaaaactttctgcaagttgctgcaaatagtattcttgttcgacagaatgctcgagttttgccaacatctgtacgatttcttcgatatattggagccgatctccttcattttgcatattcttgccttgctttaaatccaacattcgaaaggccattacggataaacattcgttgtcgagtatgcgcacaaatgcctcttcgccatgctgcttcacataatcatctgggtcgagcccttcgggaagtaggcaaatcgacactttgcagccagcttcctccaacacgggaatcgctttgcgaatcgcttctctcccggcacggtcgccatcataacataaaatgacttcttctgcattgcggcgaagaagtttggcatgatcgctgcttaaagcagtgcctagcgtagcaacaacatttgtcactccagctttccaagcggccattacgtcaaatgccccttctactaacagggctttgttttgtttacggatgctcggacgagcttcatgcatatggaataacgtctttgctttgtggaaaatcggcgtttccgggctgttcaagtatttcggttggccttcgccaatggccctaccgccaaatgccactacgcttccttgactatccgtaatcggaaacataagtcgctcgcgaaacaagtcataataacccgttccttgtttgcgtttcgccaaaaggcctgattctgccattacagctaagtcaaggccatttgtttcaaagatcacagcgagcgtttcccaatcattaagggcatagccgattcggaaatgttcaatctggtcttgcgtgaaaagcctctcttgtgcataaacacgccctggagccccttcttctgttagcgtcaaaatgctatggtaagtagaggcagcgagctcgtggccttttttcatttgcctgatgcgcgcatcttcaggtttgtccgtctctgttttttgcatttgcggcaaagctatttttgcacgttctgcgaggtgggagacggtttcagaaaaagaccagcccttcaattcctgcaaaaaagtaaacacattcccaccggctccacagccaaaacaatggtacacttgtttgtcttccgatacagaaaaagacggcgttttctcgtcatgaaacgggcaaaggcctccgtactgacgcccttgcttttttagctgcacatattcgccgatgacctcaacaatatcacttgcttccctgacctctgtaagtttttcatcgggtattttcacagccactaggcaatcaccacaattctattcctttgctatcttttcaagtacagcatatagagcatgatagaacgcggctcggtcagatgctgtaaatttttttgggccacgcgtctttttcccagctctccgggctttctgtgaggtatgcctccatgcaagcatagctggcatttcctcctctttatacacatgcccacggggcgacaacacgatcacaccttttacaagaaggagcgacgctaacgcatgatcttgcgtcacacagacatctccgcggttgacagattgcagcaaataaagatctgctgcttctttactcgtatcgacaatagccgtttctacatcctttggcaaactcatggtatgcgcataagaataaacaaagaccatttttttgccgaatgtccgcgcaagtgaaatgacttcttcttttactgggcaagaatccgcatcaacgtagacagtcgtgttagatggaatcaccatacactatcattcaacattttcaacagatctccttcttccttggcgaaaaaaataaaaatgtgtcgaaaaaagcgctacagctatccttccttcagttctatcattgccaaaaaaataagaataagtcttgactttttaaatttatttgttctcttaggattttatacataaaaacaatgaaacatcaatgataaaatccccaatgttcaattatacttgattggggatcatttgaacagtaagaaatatcaatgctacttaatttcgttgaaacatgcttgaaattaaattggctgtttcttcaactgctttatttgaaacatcgataacagggcaattgactcgatccattacctttttcgcatactcgagttcttctttaatacgatcgatgtttgcatagttggcttccgatttaagcccgagcgcttttaatcgttccgtgcgaatgctatttagtttttctgggctgatttttaagccaatgcattttttggaagagattttgaacaattcttctggtggctcgacctcaggaacaagagggacattcgccacttttagccgtttatgggctaagtattgagagagcggcgttttcgaagtacgggaaacaccgatcagcacaatgtcggcaagaataataccacgggggtcccggccgtcatcgtatttgaccgcaaattcaatagcttcaactttgcggaaataatcttcgtccaaccggtagatcaacccaggttcatagcgtggcttcgcattggttaagtcggtaatttttgaaagtactggcccaatgatgtccaccgtttctacattcgccgcctttgcgctttccaacaaaaagtcccttatttctgggacgacaagcgtaaacgcgatcagcgccttggctttgcgtgcaatttgcaccacttcttggatcgtccctttgtcctctacatagggaatccttctaagctccacattggagccactaaactggctgacagcagcttttacaacaagctcggctgtttcccctacggaatcggaaacaatgtaaaccactaggcgttctgtgtcgtttgtcataagcgcgccccttttcttttgaagttacattccgtctttgctggctagatcaacaagcagctgagtaatattggttttggtaatacgccccaccacttcgaaacctgatccagtgtctactttttttacaattggcaatccatcaatttgccgggagatgagcttttgtgcgacttcaattaccgaatcatccttttcacacatcgtaatgtttggcattcgcgtcataatgacactcacaggaatagactcaatcgactgtccgcccatgcttgcccgtagcaagtcttttcgagaagcgactccaaccaatgttgcatcgctatcaacaataaaaagtgtgcctacatcttctaagaacatcgtgcaaatcgcttcgtatacagaagctgattgctcaattaaaacgggcctcgattgataatggtgaactttgatttcctggagtttatcggcaagaacggggctttcacttttccccgtataaaagtagcctacccgaggccgggcgtccaggaacccggccattgttaaaatagccaagtctggacgtagagtcgccctcgttaaggatagacgttctgcaatgtgttcgccggtaattgggccattttcctttacaatatcgacgatttgctgttgcctagttgataattcgattggactcacctcttttttaagccagtgccaataatcttaggccgagaagacgatcttttgaaaatcagcataggactggattgatttcgccaatcggtcaagcagcgcaaggcgattattgcgagtggcttcattgtcagccatcaccatcgtatggtcaaagaacgtgttgatcgtggcacgacactgagccaacgcttgataagcggcatacgcatctttgaccttccaagcctcagccaagccgaactcgacctctagcgtagcagcaagcaagcgtgactccgtttcattttcaaacagattttcggaaacgaaaacaccttttggcgcttttttagccaaatttgtgacacgactcaagctttcggtcacttctttaaactcccggtcttccgcacgttcagttaacagccttgccttggcgaacatcgtataaacatcgacaagcggagcggcaagcaccgcatcaacaatatcatagcgaaagccagcttctagcatgacatgcttcaagcgattcgcaaaaaagctgattaattcctgcttggtcgtttcgactttttctgtcataaaccctttttttgcaatggaatcaagcgcatgaacagccatgttttcaagtgtcaaaggcatttcagtttggagaagaatgtggatgatccccgttgcttggcggcgcaacgcatacggatcttgtgagccagtggggattaagccaatggaaaaacaagagacgaccgtatcgagtttgtcggcaagcgccaacactgcacccgcttcagtttcaggcactttgtcccctgcatagcgaggcaagtactgctcataaatcgctttcgctacttgaggggtctctcctgctttttccgcatattcctgacccattcttccttgtagttctgggaattcgccaaccatgtaagtcacaaggtcgaacttggcaatagcggcagcacgctccactgtttgcctttcttgggcacccaagttcgcctcacctgcaagccatttggacaattcgccgatacgggctaccttttcgcccattgtaccaatcgcttcatgaaaaacgatgttgtctagtttagcgtttgctgcctgaagagaaatcttttggtcttcatgataaaaaaaggcagcatcagacaagcgagcacgcaacactttttcattgcccttggcgacattttcaatatattcttcatttccgtttcgcactgtaataaagtacggaagcaaacggccatctttcgcttctactggaaaataacgctgatgttcacgcatcgttgtaattaatacttctttcggcaaagctaaaaacgaatcgtcaaatgagcctgatagcgcagttggatactcgactaattgtgtcacttcttcaagaagcgcttcatctattggcacaacccagctatgctcttcctccatttgctttaactgacttacaatcgctgcttttcgctcttcagcatcggcaatgacatattgacgtttcagggcgtccgcatactcgattggattgtctaatggaaagtcagcccctaaaaaacggtgtccagtcgtgtttcgacctgtttcgataccgttaattgaaaaaggaatgacgtcctcgccatagagagcgacaagccactggatcggccgagcatagcgaagggagtaggtgttccaacgcatgctttttggaaatgttaagcccgaaatcaattctttaagttccggcaatagcacgcttgttttttcaccctttttatgtgttttggcaaacacataatcagtgccatttaccgcttttatttccagctggctcgtttctactccttgtcctttcgcaaatccaagcgccgcttttgtccaagcgccgctttcgtctttggcaatttttaaggcaggccctctcgattcatcatgtatatcaggctgccggtccgccaaatcttcaacgagtatagccagccttcttggcgtagcgtaagagtggatttctccgtacgaaaggcctttatcatcaagccatgcttgcactttttcagcgagctgtgtaatggaaggcgtaacaaaacgagccggtaactcctccaatcctagttcaagtaaaaatggcttattcatcgtgggcgtcctcctttttaagcataggaaagccaagcttttctctctcttcatagtacttgcgcgccgcttttcgagcgagtgtgcgaacccgggcaatatagccggttctttctgttacggaaatggcgccccgagcatcaagcaagttaaagctatgggagcattttaaaatatagtcatacgcaggaaaaacaagatcgcgggctagcgctctttctgcttctttttcataagtagaaaataaatcaaacaacatatctacatcagaaacttcgaatgtatacgtagaatgttcatactctggctgtaaaaagatatcgccataggtgaacccttcgacccactccaagtcaaatacattttctttatcttgtatatatgtggccaatcgttctaatccataagtaatctctgcagaaacaggattggcctccatgccgcctacttgctggaaatacgtaaattgggtaatttccatcccatctagccatacttcccagccgaggcccgcacacccgagcgttgggttttcccagttgtcttctacgaaccgaatgtcatgttttaaaggatcgatgcctaatgcccgaagactatccaaatataactcttggatgttcaatggagacggcttcataatgacttgaaactggtggtgttggtaaagccggttcgggttttcaccataacgcccatcagcaggacgtcgggatggctccacatacgcaacattccaaggctctgggccaatggtgcgcaacaacgtatgggggctcatcgtgcctgcccctttttcggtgtcatacgcatttaaaataatgcaattttgtttcgcccagaatgattggagcgttaaaatcattgtttgtacattcattgatcaacttcctcctttttcagcgtagaagacaaaaaagcgcccctacgcctattggcgtagggacgaggttcacccgcggttccaccctacttattaaacgcttaagtgcgcctcggacatcagcctgagaggcctcaacttcatataagcgtctaatctctttcttccgaatgtgctcaggaagcgcctccaacattttctggctctttggcttccaccctcccaaagtcgctacaaaccagacggcaaatgctgtttttttccgtcactgcacctataatcgtatccacattatacgcttgctccccctacttgtcaacgtcactgcttaagccgccaattttgtctagttggctaataaagcggcgcgcttttaactgtacccccacatactcatcgtagtaggtgcggatcatccattctaaccgccgcttcgtttcagctttcacagaaatggtgcctactttcgtcaaatcgacgtaataaagcactcgaaacaacttggcaaatggtagagtgattgggaaagcgcgctcgtctttatgaatacaattcctgcacaaaaaaccagcataagcaactgaaaaagcaacaggatcacgggtctccgagcggcaacaggcacagcaatctagctccggttttgctccagctagtggaagcatcttcatatccatgattcgtgcaattatttccgcgtcttgtccggtgttgatttgccgcaacgccagcagaagccaatcaaataaaaagaacgtcggtttgcgctcttccgtcagtttgtcgacaagttccgttatataagccgcataagccgatttaacgatatcaaattgtagttctttaaatgaatcgacggcctccccctggcttaaagagggaagaccgtttccttgaaaatataagtaacttccataaacaaacggctgtgtgacagcggcaaagcgactgttaggcttttttgcccccttcgccaaaacagcaagtttgccgtcttcttttgtaaaaagagttacgattttattcgtttcgccgtaatcaattgattttagcacgattgcatcttgtttttttaacatggtccatccttacagcaagcaacaggatttaagataaggttgaatccgataaatcatctggttcataagccgtttcgtcttgcacttccatgtcccgctccaactctttatgaagcaggtatgtttcaacgttgcccgtttgcgaaaacactttccatgttagaacaagcatgttaaacgcctccctctccttaagtcttcggttgtatcattcccttatccgcatcgcccattcgatggaaatattgttaattgcctgcgcttgacttttttaatttggttaattttatcagattgtttgtttaatcataaatcaggcgacataaaaaaacaatggtcaaacgcccagtttgaacccattgttttcccagttaatattcattttcattaaaaccataatcctttaattgagacggtcggttacgccagtctttttggactttcacccacagttccaaatagacgctagaaccaagcagcgcttcaatgtcgcttcgggcaagctggccgacttcttttagcatggcaccatgtttgccaatgataatgcctttttgcgacgaacgctcgacgatgacagtggcgccaacatatactttgccattgtcccgctttttgatttgttcaatgactacagcgacagaatgtggaatttcttccttcgtcaaatgaagcactttttcgcgaataagctcagcaattataaaccgttctgggtggtccgtcacttggtctgccgggtaatattgcggcccttcttccatgtgctccacaatttgttcgacaagcgttggcacattattcccttccaatgcggaaatcgggataatttctgcaaatggataacgatctttgtacaaatcaatcactttaagcaattcttctggagaaactttatcaattttgttaatcaataaaaacaccggtgttttcgtttcctgaagtcgttcgataatatactgttcaccagggccgaatttcgcatccgcttccaccacgtataaaatcaaatccacttcgcggagcgtattttttgcgactttcatcataaagtcgcctagccggtgtttcggtttgtgaatgccaggcgtgtccataaagacaagttgcgcgtcgtctcgtgtcaacacgccttgcactttattccgtgttgtttgcggcttgtctgacataatggcaattttctggccaatcacccggtttaaaagggttgactttccaacatttggcctgccaataatggacacaaaccctgatttaaatgttgttgttttttgcttcatataaatcctccgctttaaaaaatccaggcagcaattcttccactgttgtttgtttcacatttccttttaagttacataaatacacaggcatttctggtggacacaattcggccagcacttgcctgcatgcaccgcacggcgagactggtcctggtgtgtctgctgcaactgccattgctttaaatggcttttgccccgctcgatatgctttaaacaaagcagtccgctcagcgcaattcgctaagctatatgctgcattttcaatatttccccctaagacaactgaaccgtcttcaaggagcaaagccgctcctacagcgaacgatgaataagggacgtaggcgtccttccttgctgtgatcgcatgttgcattaatgtttcggcatccattttagcaccgactccttcttactggaataattcgagcaagtacggaaaaaagatcatcactcctattaccgcagcaaagatacagaacacgaacacactggcggcagcaatgtcttttgcacgctttgctaaagggcggtattcttccgtcactaagtcgacggtacgttcaattgccgtattcatcacttccaatgacaatacaccgccgaccacaagcaaaagcacgagccaccgctcaatggaaacagacaacgcccaagcagcaatcaatacaaccgccccactaattaagtggatacgcatgttttgctcatgcttaatgacatcaatgagccctgcgcttgcataacggaacgaatgcaaaaagcggcggattcctttatgattccgatctcccaagcccataggattgtaaaatctcctcttgtttagtaaacatttgcttttcctcttcctcgttcatatggtcgtagccaagcaaatgaagaaagccatgaacaacaagaaaagcaagttcccgttcaaacgaatggccataatcagcagcctgcctctcgacatgggggactgaaatgacgatgtcccctaacaaattaggtaagcccagctcctcatgaaaggttggatcaaaatcgcctgtttcatcatttaaagcaaatgacagtacatccgtcgggcggtcaatccctcgatgttcgcggtttaactcgtgaatgtcctcttccgtagtaaatgtcaccgacacttcgctttgctgggacaagctcacttcttgcgcagcatggtttagcacgtctttaactagttgcaattgctcgcttgaaagaaactgcccttcatcatttaattccacatcaatcatggtttttctcctttaggcttttcttctggatactcgattcgttgatggaatgtgccatttaacgtttcacataaggaaactttaatggcgtttaattcggctagcgtcagatcggactcatcaaactgcccatcctccagtttatctttaataattttatctaccaagttttcaattttatcaggggtcggtttttgcatagaacgaactgctgcttctacactgtccgcaatcgaaataattgacgtcactttcgtttgcggttttggcccaggatagcgaaattgtgattctggcaaaggtttttccgcatcctcatttgctttgtggtaaaaaaacttcagcaagcttgtgccatggtgctgttcggcaatgtcaataatctccttaggcatcttatgttgcctaagcaattctgccccatcgtaaggatgggaaatgataatggtcttgctaagttggggcgaaattttatcatgtggattttcgcctttaagttggttttcaataaagaagtggggcctccgtgttttcccgagatcatggtaataagagccaacacgggctaacaacccattttccccgagcacctcgcaagcggcttcagccaaattgccgacaaccacactatgatggtatgtcccgggagcttcagtcaagattttccgcagaagcggatggttcgggttcgagagttcgattaaccttgtaactgataaaatcccaaaagctgtttcaataaatggcaacaatccaattgtcagcactgcagctacaaatgcagacaaaaatgctgctgaaaaatgcaagccaatctccattacatttaaatggatgcttttcattaataatagcgcaagtaccgtgataatattcgcgcaagcaacaaacagaccggcacgcaaaatccgcgtagctttgttcgtgctatttaaaaagtaagtagccgttaaacagcttataaatatatagaagccatacgtaaatgaaaatgtgctcgtcgaatcgtgattgtaataaacactgccaataatcgcaaacaaaaagctagaaacaatcgcgatttttggctgcaacaataatgtaaggagcattgctcctgctgcagctgggacaacaaacccaaatccgtttatcatcaataggctctctaagtaactcgatgttttcattaatgccacaatcacggtaaagacgatcgcatacatgagcaaatgggagttgtcagtggcaacggtcgtttgcgaatcgtttaaaaaataggctaaaaccgcgatcaaaatgcaaacaaatagggctagccctatgtatggataaatgattaaagaatcatcaagcaagccgacaaggcggagctgttcgtaaacttgatggttaacgatgtccccttgttttacaattagctccccctcgcgaatgagaacaggctcgatcgcttcagatgtttcctgccttaatcgttgtgttgcttcagcatcatatgtaacattgaacacaattgccatgtcaacaatttcagcgacagcatggcgcacatcagaaacgagcgtcgaaatgctatcaatttggtctcgcgcttcttgttttacctcctgcaaatcgccaacgcgaatttgttggctcatggtttcatgaactgtatttaccgaggtgtcaagggctaattgaaattgggcatccgtagcctcaagcaaggcgacgatcgtttcatcttgcaaatcagcatttgtggtatcagagaaatcagcgcgcacacgttcaacttgatcttcaagaggcacgtcctggtcatcgctgtcctcctctccttccagctcggctgagtctcccctcacacttccaattacgctaaagatatcattgacttgctgaactctgtcttcttcgtattttgtattgtgcttcatttgggaatcaatgctggcgatcgcttctgtccttcgctgctccgttgccgcttggtccactaccgtcataggtgcacgaatatcttgctccgctggctcggacaaatttacgtttagccgctctggtatgacgttgtctaacatcgatacataaatcagaacgcctagtattgcaagaatggttacacgaatataaggttggtgttttatttttcgccaccatgcacgagtggaaggcgctttacgtttgtctgcagccatagctggtcacctcgctttctacccaaaaacgttttggttactgctcgttttctgtatgttcatacgcctcaaggattcgttggacaagcaaatgcctgaccacgtcgcttgcttgcaagtaaacgaaaccgatgcctttcacggttttcagctttgccaatgctgcttgtaagccagaccgcttgccttttggcaagtccacttgtgtcaagtccccgtttataaccattttcgaaccaaaacctaaccgagtaacaaacatttttatttgctcttcggttgtgttttgggcctcgtccaaaatgacgaatgcatcatccagtgtacgccctcgcatataggcaagcggcgcaacctcgatcgtccctctttccattaaccttgctgtatgctccacgcctaaaacttcatggagtgcgtcataaatgggacgcaagtaagggtccactttttctttcaaatcccctggcaagaaaccaaggctctctccggcttcaacagcaggcctagtcaaaacaattcgttgcacatggccctcttttaaggcagcaacagccatgacgacagctaaataggttttgcccgtccccgctgggccgacaccaaaaaccatgtcatgctttttaatcgtcgatacatagtgcctttggccaagtgattttgcgcggatatttttcccttttacagtcgttgcaatattttcgtcgtataaatcatgaagttcctccagcttgccagccgcttctagctgtacagcatacaagacatcacgctcacttatttgctgttgccgttccaccacttgttcaagcgcttgaaggacattggcggcacgctcgatttcacttgcttcaccaatcgctaatattgcttcgcctcttgtaacaagttggatcgacaactcttcctccaatcgtttcaaatgctggtcatttggcccgtatagcgcttgtgtaatacgagcgtcttttgcgcctagctggattaaagatgtttcagacaatcgcctcagtctccttggataattggtttttcacgtgcaatttcttctagaacttggtaatgaatcattaaagaaactttatcattttcgaccgcttcttgcaaaacatgttcagacatgatttccgcatcttctggaattttctctcttaactcccggcgcgcttcctctttcgcgactgcaacagcttcctcttttgtatacgtgcgagtaaattccaaagtttcacgctgatcgatcgtacggaactgaatcggcaaacgatagccaaacaaagaccactccgtcttctgttcaaacgtctcatacgtctcataatccggttcttttatgttccaaaaaggaatctctatgtcccctaatacaagcatacgcttgctttgttgctcgcctgtcaaagaagcaaatgtgttttcgagtggaacagttacagaagaagtataccatatttcaccgattaccgatgcttttgccgctacagtctgttcttttccttcagcgccaataaatccggatacaagcaattcgccttcttctacaaaatcattggtttttttcaccgctttgccatcttcaacaaacattttatggatgaccgctttctttgcggcaacaagatgacggggactcaacaactcaggcgcttcttggcgtacttgctcgactacctcaaattcaaaggtcgtcccttttttgcgcactccaatccatgtggcctcatcgatatactccgttacaatgcgttgcacttcgtcgggttggggtaatttaaactgaaaagcgcctcgtttaatgccaatttcgtcgatcacttccctcagctcttgttcgacgtggggggacgctcctttaatgtgaatcccccataccatgctcgacgaaaacaacatgagcatgaaaaaggccaccatcccaatggcaaacccggcgcggatttttacttttttcataaaaaaaggcaaaccagatcgttttgtaaaggttgtcttacatccagaatgccgaaagagaacacggatttttgcaatatcgttcaacgctacatcaaactgaatgttgtcattgcctccatgccggacattccagacatggatgttgttctttaggcatgcattcagtagcctttctggatattggccagccacttctaccgtaacagacccaataaatgatttaaggaaatcatttcgcatctccgtctggctcctttcttaacggttctttttgtcatcaatgaacagcacttcatcgatccgcccttccaacaataactcttcgggcaaaatcgtttttaatacaaacccatctccttttattagcaactgaccttgctttaaaagaaggcgaagctcctggttcgaaaaacggagtacaccttgatggttttcaatgtagatatgcagctggccgatcattgtgattcgcggcaaatccatgaggacatcagcaggaagctgcatgtgatgggcaatccagtttttcattcggctcgtcatctttttcatttggcagccccctctcctaacgagtctatgaatcaatgaagggaaatagcacaaaaaaccgcagccctatagggggctgcggcgaggttgccgacaaagtcgacaatatcaagctgaaatgctgtttattaatactgtctacgagggtattttgccaatttccttcctttaggcgggcctaaaatttccgccaaaacaactgctttcatcgcttccttaccagaaagatgagacagatttaaatcaaggggatcaccagcattcgcctcgtccctttttttagaagctaaatcctgttcagcctctttaaacctgttgacacgttcttgcaattggcgtctgcgctcctggagtttttctgttttctccagggcgcgctcacttgcttcaacacgtgcaggttgaatgtctggttttggttgagcaggcggagcagattcttgcggaaaatagtcttcccagcgtatttcctgctgcttcggctgtctatgatcgacgcgaggctgcgtttgtaccggttctcgttgcggccgttgttcgacaggaggctgttctgattcttcgcctctattgttctgttgttgagtcgcctgaccgattcgcgagaaaaggctgaccagtccaccaacaagtataatcacaaggaacggattggcaaacagaaaatcaaataaaccggacattcaattcccctcctgtttatttgtcgacgttgcggttgcgagggtcatttttcgaatgctgttcctctttcgttccagatgctttgctgatcgaatctctcatatccgtatccgccattacattttggtaattcatataatccatgacgcccatatggccttgacggagtgcttcggaaagagccattggcacttctgcctctgcttccaccactttcgcacgcatttcttcgacgcgggccttcatttcttgctctttcgctacagccattgcacggcgctcttctgctttcgcttgagcaatgtttttgtctgcttgcgcttggtctgtttgcaattctgcaccgatgtttttgccgatatcaatatccgcaatatcaatcgataagatttcaaaagctgttcctgaatcaagcccttttgaaagaacggtctgagaaatcatgtcaggattttcaagcacttttttatgatcgttttgtgaaccgatcgttgaaacaatgccttcgccgacacgggcaataaccgtatcttcaccggcgccaccgacgaggcgatcaatgttggcacgaacagtgattctcgctttcgctttcacttcaattccatccattgctacaccggcaataaacggcgtttcaatgactttcgggtttacactcatttgcacagcttcaagaacgtcacgtccagcaaggtcaattgctgctgcacgttcaaaacttaaatcaatattggcacgctgggctgcaatcaaggcattaacgacacggtcgacgttcccccctgccaaatagtgcccttccaatcgggatgtatccaaatcaaggcccgctttcactgctttaatgagcgggtttacgacacgcgctggcacaacccgacgaagcctcatccctacaagttcaaaaataccgattttcactcctgccgcaatggcggatatccacagtgcgactggcacaaacgtaaacaagatcgcaattaaaatgattgcaagtgcaatggcaatcaaaacgaaaatcgttgaatcgttcatcatctagtctgtctcctccttctttaatgactgtaccggctctactttccgcacaacaacacgggcaccggatacatgaatcactttaagtgaactgcctttctcaatatagcccccttcagaaaccacgtcaagccgctcctctccaattagagcaatgccagctggtcgaaggacgctgagcgctttgccttccattccaataagtgctttgttcgtttctgcagagagatacccttctgctgctgtcgtttgggcggataagacaagctttttccaaggtcctttgtccccaaagaatacgaacaagacaatgaccgccactatagacacaaacaaggcaatgccgactgaaaaaaccatgaccgtcgtcgaaaaagaggccataaagaatccgccgacaattaaaccaattcctagaaggccaaatatgccgaaccctggcgccataaattccacaccaagtagcactgctccgataacaactaaaatgagggactcccagccagcaaaaccggcaaccatgtggccaaaaaagaacagtagcagtgcgctaatccccatagtgccaggaatgccaaaccctggcgaatacagttccataattaagcctaaactgccaatcgaaagcaagatcggaatgacaattggattcgtcacaaacctagcaatctgttcagcaatgctcacattcgcttctgtcacatggacttcctcttcatcgtagcccaaataatcaagtacacctgctaaatcatccttaatggcttcagcatagccaacttcatatgcctgtttggcgtttagcgtcagataaccggaagggaacccttctacatcaaattcagcatttgccatcgcctcggcataatcaggattccgcccgccttcagggccatgttcactagcggcagtcttcatgcggctgatccaaagagactgggttttctcttctgctgcattgccagccccatcaatcacgccagcagacccaatttggccattcggtaccatgatgatttcatctgcatttaaagcaatataagcgcctgctgaaatggcttcactattgataaaggcagtaacaggaatatcagtgctattaataatattggcgatatggccagctgcgtcgacagcgcctcctggggtgttaatattcagaatgatatggtccgccccgttttcttcagcctctgaaaatgagcgctcaagaaaggcttcaaggccccgttcgaccgtttgttcaatcggaattacataaatggacgcgttctttgagtcggcttggttggcaagcacctgaaacggcaaaagcacacacgccagcagccaggacactaaggcgaatttcatccacttgcccactcgtctatcctcctccttttccaggtattactttatgtacgattccattcgcctaaaggtttcagttccttcataaaaaagtgtatcacgccatcatgagaaaaccaaacaattctattattaggatagtaaaaaacctctgcttaacagcagaggttttattggttcgattcattcgttaaatgcttgataaccaggcgattaacgagggcaccatcggctttgccttttacttttggcatgattgcgcccatgactttccccatatcagcttttgaggtagcatttgtttgtgcaattgtctcttttacaattgcttctaattcatcgtctgacaattgcgcaggcatatattcgttcagcacggatagctccgcttcctgcttttttactagatcttcacgattcgcttgttgaaattcatggagggattctttacgctgtttgacttcccggctaagaacagctaagctctcgctttcagccaaatcgcgcccaagcttaatttgctcgttttgcaatgaggacttcaccatacggatgacagaaagcctgtctttatctctattcttcatcgcagtcttcatatctaggtttaacctctcaagaagatccaagggaaaccaccctctcaaaaattagaacttgcgtttacgagccgcttcagatttctttttacgttttacacttggcttttcaaagtgcttgcgttttcttacctcagctaacgttccttctttagagagtgatctcttaaagcgacgaagtgcagcatcaatcgattcgtttttgcgaacacgagtttctgccattttatttccctccctccgaaaacaaccaaactcaacacgtacataaagcacgtctgcttaacattataatacagtggctctttttaagtcaactgcaatccgcaaacttccgctttcgcctatcccagcaaaagttgctgtcatgttattttcacttgtccatatagtgtaaggacgaggtggttgcatgggaaaagaactgtttacagtcatggctgtatttattacgctttttctgttcggcatgttcatcttgcgagccggattattacagataggggtagaaaaagtccaaacgcttttgttgaaagcgactgactccccttggaaagggctgattgcaggtacacttatcacagcgctttttcagtcaagttctgttgtaatggtgcttttagttgggcttgttgctgctggcatcatttcattcaggcaaacgatcggtgtcattttagggacaaatatcggctcttgctttacattagaactggttgccttccaactatccgacctggcagtgccgctgctgctattcgggctcgttttgcttatgttcaaaagtgcggcctcctacacagcaggatgtgtttcatttggaattggctgcatttttttagcgatgacagggctagaatcattggcagatccactcgcctctttccctgtcactcatcacttttttcaatggacaaacgacagccacttaacaggcatcggagtcggtgctattgtgacgaccatcattcagtccagtacagctaccatcggcatggcaatgggctttatccaagatcaaggactttcaatggaatctggaatcgctattatgctcggcgccaatatcggcacttgcttaaccgcatacattgcaagcatcggcgcagggcacacggctaggcttgtagcccatgcccacatttggctcaacttattgggggcggttttgttttatgctttgatcccttacttggccgatgtgtcctatttgcttgcaaaaacggctagcgtccaattggcccatgcaagtacgttgtacaatattgcttgctcactccttgtcctccctttcacagctaaatttgcccagtttgtcgaacatgtggcaaaaggatgacttctttcttgcatgtccatgtcttcgttttaaggggcgattataagggaaatagcatgaaagaactatttttaaggaggagattgaatgaaacagtcgattctcggaaaatcagggctacgcgtctatccgattggtcttggcaccaatgctgttggcgggcacaacctttacccgaacttaaatgaaaacgctggtaaagacttggtgcgacaaagcattgaacatggcggcaattttcttgatacagcatttatttatggcgaagggcgctcagaagaattaattggtgaagttctgcaagagtttaagcgaagcgatgtcattattgccaccaaagctgcccataaaaaacaaggcaacgattacgtatttgatcattctccgtcctttttaataaaatcagtcgatgaggcgttaacacggctgcaaacggattatattgatttgttttatattcatttccctgatgaatcaacaccaaaagatgaggccgtccaagcattggctgaattaaaaaaggcagggaaaattcgagcaataggtgtgtcgaactttagtttggaacaattaaaagaggcaaataaaaacggggatgtcgatgtttaccaaggcgaatacaatttactgaaccgggaggcagaagagacgatttttccgtacgtcacagagcaccgaatttcattcgtcccttattttccactcgtatcaggcttgcttgctggtaaatataataaagaaaccacttttcctagcggcgatttgcgcaattcacaaaagcatttccaaggagaaacgtttaaggaaaacatcgacaaggtcaacaaactacagcctatcgccgacaaccatggcgccgacatcgcccatgtagtgctggcttggtatttgacgcgtccagaaattgatgttgtcatccctggagcaaaacgtgctgaacaatggatagctaacaaaaaggccgctgacatccagttaacagacacagaaaaagcgtttataagcgacttgttttcttaaaaagacacaacaaaggcggagtatctctccgcctttcagactgtagacaaatgctcgtatacttcatcattggacaggcatatccgttagagcacttagcgcctttgtgtattagtagccgctacttcctgtggcacctgttacgatcgctacccctgcacttgcgccaatacgagtggcacctgcttctaccatcgcattcacagctgctaaatcacgaatacccccggaagctttcacaccgacatccgcaccgacaactcggcgcattaacgcaatatcttccaccgtagctcctcctgttgagaagcctgtagacgttttgacataatcggctcctgcttgaacagcaagtgcacatgcacgctctttttcttcgttcgtcaacaagcatgtttcgagaatgacttttgtcagtgctttatcttttgcagcatcgacaaccgctcgaatatcatttaacaccatttggtcttgtttatctttaagagccgcaacattgataaccatatcgacttcagtggcgccattggcaatcgcgttttttgtttcaaacgctttcgtttcaggcgttgattggcctagaggaaagccaattactgtacaaactgcaacatgtttgtcctctttcaattgttcagcggcgagttttacccaataggggttaatgcagactgaggcaaattggtatgtttgtgcttctttgcataattggagaatttgttcctttgtcgcatctgccttaagcagtgtatggtcaatcaaccttgcgatatcggttgccattgaacccaccctttcctgatttgtacgtgcctagctatcataccatgaaaaaagacaaaacgaacagccaactagacgagcaattggcgattgtcgttttgtcttttcctatgtatgattagagagcagccatgtacatttgtaaggagaaatgatgatgagacaatttttacagcagtaccgcttttcactgattttactaggagccgttgctataggaggggcatgtggcctttattttggggaagatgcgacaatcgttcgcccatttggcgatttatttttaaacttcatgtttatgatgatcgtcccacttgtgtttttcagcatctcctcagcgattgcaacgatgaacgggatgaagcgcttaggaaaaatcatgggcactatgtttgcagtcttttttgtgacagcggcaattgccggcgttttggcactttttgggtcttcccttgtcccgcctttatcagagactgaaacagcttcgttgcaaggagagctctcttcttatacgcctgaagaggcgaatgaagagttcaatttgcttgaagagcttgtccaaacagtcacagtcccagacttcgccgatctcttttcgcgaagcaacatgctacaattgattgttctatctgtatttgttggtttggccactacagccattggtgaacagggcaagccgttcgcccaatttttgcgttcaggtcaggctgtcatgatgaaaattatttcttatattatgtattacgctccgatcggtttaggatgttattttgccgcaattattggcgaactcggaagccaacttcttggtggatatttacgcgtactcctcctatatatcggcattacagcggtttatttttttggcttttttactttatatgcatacgttgccagcggcaagcttggcaccaagacattttggaaacatgcagtcgccccatcgacaactgcactggccacatgttcaagtgcagcgagcattcccgttaatttgcaggcagcaaaacggatgggcgtccccaaggacattgctgaaacagtgattcccttaggagctaatacccataaagacgggtctgtgattggcggtgttttaaagattgtctttctctttacgctatttggtaaggagatggcaagccctaccgcggttttaagcatcttggcagtcgcttttttagttggcgccgtgatgggagctattcctggcggcggccttgttggtgaaatgcttattcttagcatttttggctttccaccagaagcattgccgctaattgctgtcatttcaacgattattgacgccccggctacactgcttaactcatgtggcaacaccgtttgttcgatgttgactgcccgttttgttgaagggcgacaatggctcagtacccagcgatcataagtgcatacgagcatggcgcaaggatccccttgcgccatgctgctttttagtttttttgaagctcaagcaaaatcgattgcccacaaaaagtagagaccgctccgtctacttctttgatcgcatatgcttgtttctctctttctcctgccgctaacatccactttcctagatcacgtttttttgctccattcaactgcaccctcgctgtccagtcatgaaaatcaaattgcttgcaaaacgtgtgcagctgtttaacggtaaaacccgcttcttctgccatttttaaccattctgattttttataagcgcgaacatggctcggatcgcggtatgtttcaagcttattataaaagcggtcaagggcgtcttcctctaaggcaacattatcgagcaaatagagccgtcctccttctttgaggactctgtaagcttcccttaaaaaagcagagacttcgtcaaaatggtgggcggcaatgcggcaaacggctagatcaaatgcaaaagcggaaaatggtagcttttcagcagtagcctcgacaaattcaatattggttaagcgatttgttgctgctacgttttgagcggcagctagcatttctggcgtcacatcgacagctatgacgttttgcacataaggggcaatcgttttagcagcatgccccgccccggtcgcgatatcaagtgccgtcttcgctttgctgttgctaataagcgcctttagcagttccaaatcttctccttttgcgtgattcttgcttgttacataggcattcgcattcggtccaaacgtatctcttgctttttgtgtcatgccttcccctccttttgcttttagtataaaacgcgctggtagggaaagatattcggaataaatgatcaccctctataaaaaaaacgcatcccggaattttccggaatgcgttttttacacaatttgcttgtaatcttctaaaacgcggacgaattcgccatggttatatggatagcccgcctctttgatttttacgcgcaccaattttccaatcatcgtttcatcagcttctagttttacttttaaatagttatctgtatagccgacaaacaagccactttcagggttgtctttatctcgctcttctggaatgacttcaagcacttcattctcaaaacttgaggcatattctttcgctaattggtttgacagttcaattaagcggtgcacacgttcattttttatggcctcatcgatttggtctgtcatccgagcagctggcgtacctgtgcgcatcgaataaggaaagacatgcaattcactgaacttatgtttggcgataaagtcgtatgtttcttggaactcttcttctgtctcgccaggaaacccaacaatgacatcggacgtaatcgcaagccgtggaagggcttgttttaacttttcaatccgttcttcataagcggccatcgtatacttcctgcgcatccgtttcagcaccgtatccgatccagattggagcggaatgtgcatatggcggaccactttgcttgatttgccgatcaccgcaatgacctcgtcggttaattggctcgcctcaatcgacgaaatacgaagccgtttcagcccctctaccttttccaaatcctctaacaagcgggcaaggctataatccttcaaatcttcgccatagccgccagtatgaatgccagtcaacacgatttctttgtagccagcatgaacaagttgctgggcttggcgcacgacttcttgtggatcgcgggaacgcatcaaccctcgcgcccaaggaataatgcaaaatgtgcagaaattgttacagccttcttgaatttttaaagacgcccgtgtccgatccgtaaatgaaggcacatccaattcttcatatacccgtgatttcataatattgccgacagcgttgattggctgccgctcttttttatattggtcgatgtaaccaagcattttcgagcggtcttgcgtaccgacaacaatatcgaccccaggaatggccatcacttcagcaggagacgtttgcgcataacagccagttacgcaaataacagcgtctgggtttttgcgaatcgcgcggcgaatgacttgcctgctttttttgtcacctgtattggtgaccgtacatgtattaatgacatagacgtctgcagtctgttcaaactcgactttttcatagccttcttgtttaaacagctgccaaatcgcttccgtctcgtaatggtttactttacagcctaatgtatgaaacgcaacagttgacaactggattcacctcataattcaaattggtacgaaagagcagctaacacgtacatagcagccgtttcagtacggacaatgcgagggcctatgctgcaagagaccgcgcccttcgccgacaaaagcgctacttcctcacgagtcagcccgccttcaggaccgacaataaccaaaagagacatgcctggtttgagcatagcaaaagcgcgctttaagtttgccttttcaccttgcttcgcttcttcttcatcacaaacaatgcagacatcgtaatgagtaagggcctcggcaaccacttttagcggcacaggcttggccacatttggcacgaaaaggcgatgtgcttgttctgcggcttccttagcaatcttttgcaaacgctccgctttttttgtgcccttcttttcatcccattttactatagatcgactcgcagaaaaaggcgcgaatgcgtacgcgccgagttctgttcctttttggacgatggtttcaagcttatcgcctttcggcaggccttgcgcgaccgtcacacggattggcaattctgtctcgttgtccatttcgttgagaacggtgcctttgacgctagatgggtcgaattgcgaaagctgaacaagcacggctttgccgtcttcattgacgcaaatgacttcatcgcctgcttgcatacgcatcacttttgtaatgtgcgcggcgtcgtcgccagttatttcgacaacttcatttgtcaactgttcatttttaataaagtaacgctgcatgcctttgcacctacctacgcttggctgggtttttgcgcaacaatcgctacccagtcgtccaattcgttcacttcctgaatcagaaaacctactgcctttaatgccccttcgacagcttctcttttgctagagatgattccagaagttaaaaagagcccgcctcgtttgacaacacggtaagcatcggccgtaaactgcaaaatgacttctgctagaatgttgctaacaagcacatcagcgctttcgctagcaacatcgtctaggaggttgccttgctgcacatgcacgaagtcactagcgctgtttagggcgacattcgccttcgcgctattcacagcaacctcatccaagtccaacgctgtaatagactcggcgccgaatttccatgcagcaattgcaagtatacctgaaccggtgccaacatcgatgactgcatccccttgcttgaccgcatgctcaagtgcttgaagcgacagaatcgttgttggatgtgtcccagtgccaaacgccatccctggatctaattcgatgacgatttcccctggacgggcgctatactcttcccatgtcggcacaatggtgacttgctccgttacttgaacagggtggtaaaagcttttccatgccgttgcccagtcctcttcttttacttctgtataatccattgtcccgtggccaatgtcaatttgaaaggaaacgagattatggacgcgccttcttacttcagcaatcgtttccttaaaagtggcgcccattggaaaataggctttaaccatcacaccttcatcggggtaatcctccggggagagctcatacacttccccatactttacactccactctgtcacaaggtcctggggatcctcaatcgctacgcctgcggcacctaattcatggagaatatttgatacaggctccaccgcttcctgcgtcgtatggacgcgaaattcagcccatttcatttgttcggccacctcgcttgatttcaatcgcctttgaacgcacggcgcagtttgtcaaaaaatccgtcattttgctcctctggccttccgccgctcataccggcaaattcacgcatcaattctttttcattttcagttaaatttttcggcgttacgacacgaacttgcacatgctgatcgccttggccgcgcccatgcacattcggcactccttttcctctcaggcggaaactagtgcctgtttgcgtgcctgctggaatttttaatttaacttttcctgtcaaagttggcacttcaatttcatcccctagagcaacttgtggaaaagtgagcggtacttcacaataaatgtcttctccatcacgttcaaaaaattcatgtggcttcacttggaagacaacgtaaaggtcgcctggaggacccccgtttgccccagcttcaccttgtccagctacgcggagttgttgcccattatcaatccctgctggcactttgatattgatttttttgcgtttccgcactttgcctttgccgctgcatgtagcacatttttgcttaatgattttcccagttccttcacaatagttacaaacacggcgattaacaacgcggccaaatggcgtgttttgttcaacattcagttgacctgacccaccgcaatgggaacaagtatctggctttgtacctggtttggcccctgatccatggcacgtaccgcatgtttcctcacgggggatttcaatttcggtttccttgccaaatactgcttctttaaactccaatgtcatcgtatattgaaggtcatccccttggcgcggggcatttggattgcggcgcccacctccaccgccaaaaaacatatcaaaaatgtcgctaaaaccaccaaaatcgccacttgcgccggctcctccaaatccttggtttggatcggcatggccaaactggtcataacgggctttcttttgtggatcgctcaatgtatcataggcttcttttacttccttaaatttcgcctcagcgtcctcttccttgttgacatcagggtgatattttcgtgctagttttcgatatgctttttttacttcttctactgatgcattccggtctacgccaagcacttcatagtaatctcgtttgctcacgtgtagtttccctcccgactgaagctgtctgtcgcttcacgttttctcacataacgttcatcataccaccatataaagcgcggttgcaatctcgacgcttttttcagagaaaaaagccaaagccactactgactttgactttcttccattaagcaagcttattttttgtcgtcgtcgttcacttcttcgtaatctgcgtcaacaacgttgtcgtcttgcttatccgcactttcattgccgccgtcttgttgagcttgtgccgcttgtgctgcttgctcatacaactttgtcgtcaaagcagtgacgatttcttgaagttcgtccttggcagctttaatgtcgtctgtgttgtcggcttcaagtgcttttttcaacttgtcttttgctgcttcggctttgtctttttctgcttgatcaacattgtcgcctaaatcttttagcgttttttcagttgaaaagacgagctggtctgcttcgttacgcagttctacttgctcgcgacgctttttgtctgcttctgcatttgcttcggcttcttgtaccattttatcaatttcttcttctgataggcctgaagaagacgtgattgtaatcgattgttctttgttggttccaagatctttcgccttaacattgacaataccgttagcgtcaatatcaaatgtcacttcaatttgcggcactccccgtggtgctggcggaatgtctgttaattggaaacggccaagcgttttgttgtcggcagccatttcccgttccccttgaagcacatgaatatcaacagaaggctgattgtcagcagctgttgaaaacacttgtgattttgatgtaggaatcgttgtgttgcgttcaattagtttggtgaatacgccgcccatcgtctcaattccaagagacaatggtgtaacgtcaagaagcacaacgtctttaacatcaccagtcaacacacctgcttgcactgcagctccaagcgctactacttcgtcagggttgacgcctttatgagggtctttgcctgttagctttttaattgcctcttgtacagccggaatacgagtcgatccaccaacaaggacgactttgtcgatgtctgatgcggacagaccagcatcagagagcgcacggcgtgttgggccaagcgtccgttctacgaggtcggcagacaactcatcgaatttcgcacgagtcaatgttaactctaagtgcttaggacctgtggcatcggcagtaataaatggcagcgaaatttgcgtttgcgtaacgccagataaatctttcttcgctttctcagcagcgtctttcagacgttgcatcgccattttatcttgcgacaagtcgatgccgttttcttttttaaactctgctacaagatgatccatgatcacttcatcaaaatcatcgccgcctagtttgttgtcaccagaagtagcttttacttcgaagaagccgtcgcctagttcaaggatggaaacgtcgaacgtaccgccgccaaggtcataaaccagaatcgtttggtcatcttctttttcaagaccatatgcaagagctgcagctgtcggctcattgacgatgcggtccacttcaaggccagcaattttgcctgcgtcttttgtcgcttgacgttgggagtcattaaaataagctggaaccgtaatgaccgctttggtaactttctcgccaaggtatgcttctgcatcggcttttaacttttgtaaaataatcgctgaaatttcttgaggggagtaacttttcccttcaatgtctactttgtaatcagtacccatatgacgtttaatggaaatgaccgtatttgggttagtgatcgcttggcgctttgccacttcgcccacgagacgctctccgtctttaaaagcgactacagaaggcgttgtccggttgccttctgggtttgggataaccgtggcttcgccgccctccattacggccacacaagagtttgttgtccctaagtcaataccaataattttgctcatgcgtcgttcctccaagtcctattgatttactttcaccattgagtgtcgaatcactcggtcttttagtttgtaccctttttgaagttcctcaacaatttggttcggctcatagccttcctctgacacttgcatcactgcttggtggagatgtgggtcgaacagctcaccttctgtaggaatcggttctaccccttcttgttttaatgcttcttctacttggcggtacaccatttccattccttggagcaattgctttgcttcttcatgtttaggttcgaccaacaaagcgcgttcgaagttatcaagcgcagggagcagtttttcaataaagccttgggcgcggtattttgcctgcgcctctttctcctcttttgtgcgacggcgaaaattttcataatcagcacgaacgcgagcgagacggtctttcaattcatttagctctatttcaagagggtgaacctctggctcttcttgttcttcaacttcagttccgctattgttttcagtctcttcttgctcagcggaatcgccgtggccgtcttcttttgtttgttctgtttcttctgtttgcagttcctcgttcttctcttctgccacgtttgttcacctcctgtaaaatcatcgtctatagcttgcgggctttggacatttgcccgcgccttctatgtatagcagcagaggactgctgcgtatacgaaatactaacgttcaaaaccagttaaccgttttgtcaagtctttcgacaaggagtcaaccactttaatcatccgcttatattccattcttgtcggtccgatcacgcctagcgtcccgacatggcggccgtcaatggcataagatgctgtaatgacactgcaagactcgaacgcttccagtttgttttcttggccaatcgaaacatggagcccatctgtttgttgtgcgcgcagccacttttgcaataaattttcctcttcaagtgctttatagagaagcctcattttctcaacatcttgaaattcaggctgttccattaaattggttttccctgaaaaaaatagtttctctcctgaagcaggaaccattgactgctgaagcatatggagaatatgttcgtagttattgatatgcgctttaaaaagttgggcaagctctgtattcaacttccgttgcaaagaagacaacggcgtgccaacaaggcgctcatttaacaaattgaccgtccgctctaaatcggaaggcgtcacattttcatccacttggacaagcctgttttcaacatgcccgttttcgcttacaaggatcacaacagccttttggttgctcatcgggatgatttgtatatggcgcaaacgttcatttatcgattctgggccaagtacaatcgacacatagctagtcatttctgacaaaatccgcgccgattcttggaacacctcttccattgcctggagcctggctgttgtcagcctggaaaggccagctcgctcagctacagtcaaacggtgcggcgacaataaatggtcgacatagtaccggtacccttgttgagaggggacacggccagctgaactatggggtttttccaaaaatcccagttcttcgagatcagccatttcgttccgaatcgttgctggactgtatgggatatcctctcgtttcgagatgctgcgcgaaccaaccggctcagcagagcgaacatagtcgtcaacgatcgcatgtaacaccaacagttgtctttccgttaacatcccagcacctcctgttagcactcaaatgcaacgagtgctaatactattgatacactatcaaacaggtgtccatttgtcaatgaaaaaacgctcaatgatcgccttgcagctcgctgtcttctaaaacagccacaaacaatgcaaatgcttcattcccaagcaacaacccattttctgtcaaacgaatcacgtggtcgttttcttctagaagcctttttcgtttcccttctgcgatttctttggcaaacagcgactccacgtctagcccataacgcgcaaaaaaatcagctttatttataccgctacgaatacgaagccctaaaaaaacagcctcttctaaacactcggcccgactgacgacatgggtccgcaaccgcggctctccagtagcccacacagcttcaatatattttgcaacgggattgatattttggtagcgcacttgattttcatagccagaagcaccggcgccaaaaccggcatatggttcattgcgccaatagacaagattatgtttgctctcatagccaggtttgccgaaattgctaatttcatactggtcaagcccagctgcggctgtttttttcttaagcagctcatacatcgctacatcatcgtcttcagggggcaagtggagctgcccttttttgtaacggttataaaagacagtttgtttttcaatttttaatgcataagcggaaatatgttctacgtctaaggacaaagcgcgatcgactgagcgttcaaagtcggcaactgattggtttggcaagccgagcattaaatcaatagaaagattggtaaaccctaatgaacgcgccttacgaacagcctgctccaccccttcgggcgaatgggttcgtccaatatccgctaacagcttttggttgaatgtttgcgcgcctatgcttaagcggttgacaccgtaacgtttcataattccgagcttatcttcatcggcgctgtctgggttcacttcaaccgtccattcttccagtgcgcttaaatcgaaaaggctctctatcgctgaaaacagtcgttctagttgtatagccgttaacgctgtcggcgtgccaccaccaacataaatcgttttcactaggccatctcttcgacgggcacgggcttgtttcatttcttcaattaaagcgtcaatgtaggcatccacaggctggttttcaataaatactttattaaaatcacaataatgacagatatgttcacaaaatggaatatgcacatatagcgagtggctcacgcgtctctcctccttgctcatttaagtgtcctttcctcaagcctacccttggaggaggcgtagcagccccagcaaatttgtagcaaaaggaattgatttgacagaaaaaagccgacctcctaaatacagaaggtggcctctacgtattttcatttagaggtcggctcttttacggctggaagcgggcaattctataagggcatcatgcacaagtattgcttacttgtcgtccatgcgcagtacagccataaaagcttcctgtggaatctcgacgtttccaactgctttcattcgcttcttgccttctttttgcttctcaagaagctttcgtttacgggaaatgtcgccgccataacatttagctaacacatttttgcggattgctttgatcgtcgaacgagcgataatttttgtgccaatacttgcttggacaggcacttcaaattgctggcgcggaattaactctttcagtttttcaacgatcactttcccccgttcatatgccgaatcgcggtggacaatgacggacagagcgtcaactttctcgccgttcaataaaatgtccatttttactaattttgattgcctgtagccgattagttcataatcaaaagaggcataccctttcgtattcgatttcaattgatcaaagaaatcgtagacaatttccgataaagggatctcataaatgatttgtacgcggttttcatctaaatactgcatgtccacaaaaatgccgcgcttgctttggcaaagctccatgactgcaccaacatagtcattaggcaccatcacagtcgatttgacatacggctcttcgacatggtccattttttggggatcaggcatatttgtcgggttgtcaatttggatcgtattgccgtctgtaagcgtcacatggtaaataaccgatggcgctgtcgtaattaaggaaatcccaaattcccgttcaatccgctcctgaataatttccatgtgaagcaatcctaaaaagccgcagcggaagccaaaaccaagtgcttgtgacgtttctggttcatactggagagaagcatcattcagctcgaggcgctccaatgcctcgcgtagatcgttgtaatcatttgtatcgatcggataaaggccgcaatagaccattggattcatccgccgatagccaggcaatgcctcttgtgctggattgacggcgcttgttatcgtgtcgccgacacgagagtcgctgacatttttgatcgctgctgttaaaaagcctacatcacctacagttaattcttcgcatttgactgcttttggcgtaaatacgccaacttcattcacttcaaattccttccctgtttgcatcatcctaattttttcaccagggcgaacagtgccctcgacgatacggatataagcaatgacgccacggtatggatcatagagcgagtcaaatattaacgctttaagcggtgctgttggatcgccagcaggggcaggcactttctcaacgacctgttccaaaatgtcttcaatgccgatgccatttttggcagaagccaatacagcatcggaagcatcaaggccaatgacgtcttccacttcttttttcacacgttctggctctgcgcttggcaagtcgattttattaataacaggcaaaatttccaagtcattgtctaatgccaagtaaacgttggcgagcgtttgcgcctcaattccttgggcgctatcaacgataagaagcgccccttcacaagcagcgaggctgcgggacacttcataagtaaaatcgacatgtcctggcgtatcaattaaatgaaaaatatactcgtttccgtctttggctttgtatttcaattggactgcgttcagcttaatcgttatgccacgctcgcgttccaagtccattgcatcaagcgcttgttctttcatttcacggtcagtcaatgccccggtcctttcaaggatgcggtctgccaatgttgatttcccgtggtcaatatgggcgataatcgagaagtttcggattctcgactgccgctcaagtcgttggtcgttgttcatttttcttgactcacccctaaaatgcgtacatgtacactgccccttattatagcaagccaatggcggcgcttcaataagagctttcagcggattcgtcatggcgttcgctttctttattgattccattacgtactgctgtcatcagcccctctaaaccgcttctcgccgcagactcagctccacttgcaagtgttaatcccaattcagaaaaaaagttcgtcgtgcctgcaaattctgcgtctgctactgtaggtgtaggaggagtggccgaaatttccctcacaggctcttccttgttcaactcaagtggtttggtttcgcttaagccggcgtgttcgctcataagctggactccgagcatcatgccaaacagcatacacacaataagcaacaccccgaatttccccaagcgcttcattcgttctccccttctttctcgttatagtagtaatctgcgaacacttcagcaaacgcatcgattgaacggtacgcttcttcaagcgagttatcgacaccaccaacttcaagcaaaatcgaattggcaaacaaatcttggttaaaccgcccgtttgtacttgctccactctttttaaagacgcctcggcttaatgacgggtaaatttcctctagctttttatgaagctcatttgcaatttgcaaattcgattcaaaatcagcgtagttttgaccgactacaaagaatggacgcgcaaatgtttcgccattgatcgtcactgttgttttatctctccggatcgaatccctgtgcaagtcaaagaaatacattaagtcgtcgttgtcagctttcgctgacttaataaattcacgagaaacgtcataagaagcctcatatcctaatccacgttccactaacgttgcctggacatcgcgctcctctacttgggcgtaaatgccatgttgttccaacgcttgctttaagcgatccgctaccattgtcatattgatctccttgtgcgtcgctttattggcgttttctgtatcctccatctccaattcaggaaagaatgattcatacgtatgcgttgtgccaatgtacacatcgaccactttgtcttcgtccgctttgtttgcttgctccgcttcttttttcttggctgcttcctcttccgcctttttacggtcaagcgcctcttgttttgctttctgttcactggcgagcaaatcgtccggcggcgatgattcaacaggcaaacttgtataatcagtgccttcaccggcaatatgaatggtcgtgtcaaacaatgaaaaaccaggaagctcacgaccaagcaggctccttggatcatctgggttaatgcttgtcgtaatcgcaaaaaacaacgagcctaacgaaaacgactccctttcttcgtcaggcaacgcttccgtaaaaacgcggttttctgtgcccatcaactttaggaaatgtcccccgcttaacgtggttgtccaatttgccagcgcacgggaagagaatgttttgcttggccccgatgacaccaatacactcgtgcaaagaaagaccgccatcaacgtaatgaccaagctagctgcaatacgcataaagcgcgaatgtgattggccttgtttcatatttgacgacctccctgttgtgcttgtccttccatcttatgtatcaaggagaggccatagaacagaaaagaaagcaggcgagtgcctgctttcttttattaatgagtataagcgccgacgtttttttgatcgacttggccatgcaaagctgcatttagcccgccagctaccacatgggccatgtcttcaataaagacgtctatttcttttggtgttaccattaagttatggccaagaggggcgagcacttcttggatcaattgccgcttttcagggccttcaagccctccgaccatccccataatggcttgtctgcccttttcatcaggcaaatcttcatcggttagttgccgcttttcgccaaacatcatcccagctggcgctaacctttttgacggcttgttgccttcacgcatttctttgcccaaatgtttcatcacataatcaatcgcatccgacgtaatcgtcacagcgtctacaaccgtaggaatgccgattgcaataacgggaatgcctagtgtttcttcgttcattgctttgcggttgttgccgacgccactccctggatggatgcctgtatctgcaacttgaatggtcgtatttactcgctcaatggaacgagaagcaagagcgtcaatgacaacgacaaagtccggttttgttttttcaataacgccaaaaacaatgtcgcttgtttcaatcccagtcgtccccatcacgcctggtgtcaaggcacttactggtcggtagccctcctctatttcttcgggagccaattgaaacaaatgcctagtaaccagtaattcttccaccgccaatggccctagcgcatcaggcgtcacattccaattgcccaatccaacaactaaacaagtgtccgagtctttaattcctttattgcgtaaaaaagcagcaaactcttttgcaaagacgcgttcgatattgtcttggagggccgtgtcttttttccttattccttgcgcttcaaacgttaagtaatgaccagcacgtttatttaaccgtttcgcgccttcctccccgatttctacagtagtaattttaacgccttccaccgtttcctcttttaccactacgtccgttaccgcacttgaactttcttgaccggctttttcacgttgttcttcaaccgccatttcatgtgcttcaagcgctaaatccgttctaatttgaaatggttccatatttaaatcaggcatccaaaaccgcctcctttttatcagtggactacttgtattgtctctcacgcgcgaaaaaacattcgccccttttgcaagctgtttccctcgtttgtattgcaatgggcttctagttttgataaaatgcagattgttgtactagcgcttaatgatggctataagtggaataagccatttaagttggaggtgaaataaatgccaaatattaaatctgcgatcaaacgtgtgaaaacaaacgaaaaacgccgcgcacaaaatgctgcgcaaaaatcagcgctccgcacagcagtgaaacattttgaaactgctgcagcaaatggggatgtagaaaaagcgcaagctgcgtttgttgaagcatcgaaaaagcttgataaagccgctacaaaaggtcttatccataaaaacgctgcatcccgtcaaaagtcgcgcctagcgaaaaaattgaacggattgtctgcttaataagacttgctagatctcgggcattgccccgtgatcttttttatggcaaaaacaaaaagccttagacgctagtcttaggctttttacgtgcttgccaatcgcagcagcaacagctcgacggccaactctttatcggcctgccctgtcttaatggcatagtcagtttcttcgcaaacgataagggcttgtcttaattgcttggtcgttaacgctttgacttgctgcatggcgagctttactacataaggatgcaatttaagctgtgatgccatctctttttgcgtgtaccctttggctagcctcgttttcacctggaaaaattgccgaaattgccgcgtcaacaacgccagtatggccagcggctcttctttttgcctcaacagctggtggtaaagccggaccgcgtcaccagcacggcctttcgccgtgtagtcaatgacagtaaatacactttgttccactgtctcagcaacgagttcgtcgacaatgcttgctgtgactgggtccccgtctttgctatacaacatgcacttctccaattcccggtgcaacaacatcaagttagggcctgtacgcttatacagcaattgcttcgcgtcttgctcgatcgcaacgccctcctgtttagctatcgcctccatccacgcaaatgtttccttttcatcgaatggattcacatcgatagcgctcgtttgtttttttaattttttggtgattttcttgcgttcatctaatttttcatacggcgcgacaacgacaagcacggtttcttgtgcaggcgagtcgagataggcttccagcgcgggaatgtcatgctccagttttgtcgctactttctggctcgttgccaaataaaagtcttggatcacaacaagtttccgcgatgagaaaaacggaacagtctccgcttcctccaccacttcccctagcggcgtatcttgtaagcgtaagcgaatatcattcatttcgccttcttcccctgcaaataatgcttcgcttgctttttgtaaaaattgctcgattaaataacgttctgtcccatacaaaaagtataccggtgccattgtctcactcgacaattgcttcatttccgtaatgatgctcatatccgacctatcccctatattcctgacctgttcatgtttattttaacatatttccgaaagaaatctccctcttcgtagcatagcctaacggataatatcggttgcgatgaacgggttatttgtcgatagtaaagggaaagccaattgccctaagttttatcgacaaatgcttgataaagtagctcttgaacaacgggattcgcttattagccattgcctaataaaagataactcttggaacaagagggttcgcttggtctctttcgccaaaaggggcgatcacccaagaaacccctctttaagcgacctggatagcctttattgcccataaagcaagaggcaggccattccgcctccctctttgctagttaatctataatgaacgcatgccgccaagaaccctaggtattctaatagcatgcgggcaaccctatcgtctatggcattgtatgcatgtaaaaaggaaatggtgctttttatagacgctttcagacagccttttcatttttaggcgaatcgcgtatactagacgtagacaaggaggtgccttatgaacaaattcgaacaggacgttcaagataaagcaaatgacatcgtcccttcaggtatcggctttattgcttcatttgcttttttcacaatcatcttccttatcgccaatattgtcgatgtggcaagctattactaatggatcgattcagactgatcggaaacgcttgtcagccgaggggaacaacgaaggatgcgagcgttttcctataaagtctggggcagattattttctgccttttttatgttcacggttttagcatcgtctccaccgcctcaatttccccattgctaagcgtcagttcaaccattccatgtacatctgttcgccacacgatcatattcgccctttctagccgctcaaccacttcagggtgagggtggccaaagcggttttgggcccctgccgagatgaaggcatagcgcggtgccacttggctaataaacggttctgtcgtagacgataaactgccatgatggccaacttttagcacatctgcttgcatgccgggatacgagcgcataagcctctgttctcctgcctcttccaaatctccagtgaatagaaacgtcaccccttcaatttcagcaaatattacgatagaaccgtcatttcctgtaaagtgttctccctctggtggatgcaacacataccaattctcagcaagcacctcgtttgctctcgtaaagtggaggttggttggcgatgcgtgaatgttttcgaggagctcaatttcagtttccttttcaactggccctttcggataaataacctgttcgacattgatttcattcaacaatccagttgccccgccaatatggtcgtaatcgccatgtgttaaaacaagcatgtctattttgctgatgcctttcgcttttaaaaatggagcaatgacatcactgcctgggtcgaacgtgtttttccgttgctgccagtcttcttcctcgccataagctgccactcccccagtatcgatcatataaatcccttttcggtaagggagctcaatcaaaaaactatcgccttggccgacatcaatcatcgtcacagctgcttttgactgaacgtaaggcgctacagctccaacgattaaacaggcaacaaaaggcaaaaaagcgatcggcaaaggccatttttgttcctgccaatggacaaaagcaaaagcaagggcgccatacattgcgactacaagccataccggaggtttcccaagcacaagctgaaaagtagattcacttagcttaagaagagttggatgaacaaacgtcaaaagcgattcgagcaatccaataaacagatttacttgctcaggaagccatacaaacgcaatcagagagaggaaactaaagggaagaacgataaatgaaacaagtggaatatacacaaggttgaggagaaggctgaaaggtgaccattcatagaaatggaaaaagataagcggcaatccggcaaactgggcaattgttgtgaccgtgcacatttgccgtaaataccctccgtttgcggtttgaatcgttttagccgagaaaatcagagcaaacgatacgagaaacgaaagttgaaaaccgagttggaacagtttgtaaggatccaacaacagatagaggaaatagatcgtagcaaaaccgaataaggggtgaattcgccatttgcgtaaggcaaatagaaaaaacacgaatgccattgcggacgcgcgtactaccggaggcgccgccccggcgagaattgcaaaaataggcaagagaataagcatgaatagtgcggcacgctcacgcgtcaaaccgatgcggatacagataaagaaagcggctccagtcaccaagccaacatgcaagccagagatcgctagcaagtggataatgccaagcgttgagtaagcttcaatcacgtcttcttctacatagaaacgctctccaagagtaagcgccaacacaatgcctcctgcttcttctggaaaggcagcagccgcctcgtgaagcaattgtgctcgaaatgcctgcaaatgggtcaataacgaaagcccgtccgggcgtttgcatacaaaggacccagactctgcctccaacagccagtgaattcgttgctcatataaatagcggctatagtcaaatgcataacggttgcgcggaggcgctggctcgctcaactttccatttacgcggcaatggtctcccggtaataatttccctaaacgttgctcgctttctgattgcaaacggcttgctaattgcaagcgctccccggccgttgtttcaacgactacccggaagcgattgccatcaaggcgaggtgtttcttttaccactacaataaacgccgtttcctcacctgaaagcatgctgacgttgctttttttgtgcacagtcgccacactagcaaacagaagcaacggcagtacaaatgccgtcaccgctgctagccggccgctccgccaagccgcgggcaggagagcgattgctcctataaacaaagcgacagcaacgccaacatggctgcttaaaacgaacacaacagctgcgctcgctgtgagcaaactgatgcacaggcggttcatttctcttctggcacatcattgcttgctgagaaatacaagttctttgttcgctttacataggcatccaattcttcttcgcttgcccctaaccgttcaatttcttgcaaaagcgctgttgttaaggcaagcttctcatggaactgttgatcaatggccgcttcgtctagttccacttctatgcatggaatgcccgcttcgttgaacaactcttctgcataaggatggtttttatagtcctttgcataataaacgcgggcaatgccagcttgaatcagcgatttggtacaatgaatgcaaggaaaatgtgtaatgtaaatttccgcgccagcggtcggcacaccaaatttggcgcattgcagcaacgcatttacctctgcatgaacggtacggatgcaatggttgtcgactacataacagcctttgtcaagacaatggtctgaccctgaaacagagccgttgtagccgcctgcaataatccgcttgtctctcacaattgtggcgcctacttttaaacgtgggcatgtgcttcgcagcgaaagcaatttgctttgcgctaaaaaatattgatcccatgaaatacgttccattgcttttcccctttcgcttaaattgtagaagcgatcgccaacataagtcaatctttacttcacccgaatcaatggttcaagtgcttcgaatgttttttcgccgatcccgctcacattcattagctcttcaactgtggcaaatgagccgttttcttccctgtatccaatgatcgctgccgcttttgacgggccgattccttgtaacgttagcaaatctgcttcagtggcttcatttatattaatggtgtcttcatgatctgtctcattcatttcaacagcaagaaccggccctgccccttcgtcctcaccttcttttggcacatacacaaccatttcatcttcaaggcgcaaagctaaattgaccgcctcacggttggcgctgtccgtaaagccacctgctttttcaattgcttcaaataaacggctgcccacctccagctcgtacacgcctggcgaagctaccattccttttacgtcgacgacaagaacgccatcccctgcttcctcctcaagttctgtttcctcgctttcctctaaccatggcggtatctcattgacagtgtcattttccccttgaaagtcgacaaacaccaaaatgacgacaatgagtgtacaaatcgtgactccgcccccatacaaagcatacttttttatcgggaacgtcttcataaattcctcctttttggaatgatgaacaggcaggttggcatacgttcatgaaagagcagctatcgaggagtgtgaggatatgaatgtcggttttattggtacaggaagtatgggaagtttattaattgaatcatttattgatgccggggcgctgaaacagacgaatatttccatcattaaccgttcccctgaaaaagcggctgcgctgaaagcaacgtatccagggattacggtgtgtgcttctcttgaagagattgcctctacatgcgagtggctgttcctttgcgtgaagccaaaggaaatgcccgcattgtttcacgccctccagccccatgtggctgctgatcaaatcgccatttcgattactagccctatttctgttgagtcccttgatgcggctttgccttgcaagacatgccgtattatccctagcattttaaaccgtgctttgtctggatctactttagtgacattcgggaataaatgtacacaggaagaccaagcaaatttattgcgttttgtatctactgtttcagagcctttgcaaatcgaagaggcgattacccgtgtggcgtccgacattgtcagttgcggccctgcgttcttttccttccttgcgcaacgatttatcgatggcgcggtaagcgaaacgtcgatctcacaagaagaagcgaccgagttgacgacttcaatgatcattggcttaggaaaattattggagagtggccattacacgcttcccgcattgcaaaaacgagtttgcgtccctgggggaatcactggagaaggccttgctgttttagatgatgaattaggggatggttttggttctctgttcaaacgcacacacgaaaaatacgcaactgaaaaagaaaagctattggcggaagttttatacgaaccaaagtaaaaaagcaggaggtttggctttccctcctgcttttttcgtgttattttgcctttttcctgcttaaacttttcgacaagagaaaaacaaccgttcactcttgcttgtcggtggttcatttgtaaagtccgcggtcacggttagatcagcgaatcccgcctgtttcagcatttctttatacatttctactgtatacgttcgctcaaaatgcgcttcttccagccgttcatatcgtccatcttgttgccgaacaaaaaacgtcagttcgtgtacgacacttaagggatcttcccctgcaaaactatgccaaatgtatgaaacttcttcatctgcctgagcgtgcacttctccaggaaaggcttccatgcgtgtaggagaatggacatcaaagagaagcaggccgcccttagttaacaggttataacaagcggcaaaagtgcgtgtcacactgtcctcgtcttgtaagtagtttaatgaatcgcaaaaaatcgtcacgacatcaaatgaaccaactggcggcaagtcgctcatatcgccttgatataacagaggttggtaacctgcttcctgcaatttggcctccgctaccgcaagcatttgttctgaaaggtcaacccctactgccgtcaaaccacgttcatgcatctctaacagccattcccctgtaccgcagcctagatctagcactcggttagcctgaacgccgtacatgttgcatgtgcgttcaaaataagtggcccactttgtgtaatcaacatgactcatgaatgcatcgtaccagaaagataaatggctgtagctcattccttttccacccgatacgtaaaaccgtcacgctgttcgactttgccgtctttgatcagtttgccaagcgcccgtttaaatgccgccttgctcataccaaaacgggctttaatgtcttcaggaggcgatttatccgtataaggcattccgcctttacgttctgccaaaaaagcgagaatgcggtcagcgtcttctttttgttgttctgtacgaagcagccgttgcgttatattcacacgcccatcgtctcgtacaaattggacacggccgtgaatcgtctgtccaaggcggggaacttcagcagcttcatcttgatggaggaaaccgacaggaccattttcaatgagcaacgctgccccttcatcaagaaagtggtaaaccacgcctttgacttctttatttaaccatgattgatctgccgcaattgcttgggaagtgacaggcgaccctttgaccaacttgcccattagtcgcccttttttatcccacgtcaatgaacaaaacaatcgatcccctgccgctggccactcacgccgatcaaaaggcaattcatccatcgacacaaataagtcccttgaaattccgttatcgacaaaaacgccatgcccttgacgcacgctgacaacctttagccagcccatttcatcgtttttaataatcggttcgtgcatcgttgctgagagtcgattttgatggtcatgatatagaaacacacacactttttcttccaactcgagaggcttcgtcgcctcgttttgatggagaaggatatcggtatgcccatcacttaagaaataaccaaatggcgcttcccgtacaacagccaagtccgccgtaatccctggctttagcattcgttcagtacctcttgcaaatcgacttgagctgcgtccccccacaacttctcgaggttgtaatagagacgttcgtctttatggaaaatgtggacgacaacatcgccaatgtcaatcagcacccaacgggctacgtcgtacccttctagccgtttaatgtcaagcccagcttcttgggacacttttttcaattcatgggcaattgcttgcacttgcttttcagaatttccgtggcaaatgataaaataatcggcaatgggtgaaatgcctcgcatatctagtgcggtaatttgcatcgcttttttgtcgtctagtgcggcaaccgccatttttaaatgttcattcaaattccattgctcctttctgtttataaaaagcgttataagcggatacggtttccgggtggatgagctgttttctatctaacaataaaaacatcgtttgcctaagggcaaaacaacaagctgcgtctaaactttcctcagctaattttctcgcttgttccacacctggaaaacgccggtttggttcaatataatcggcaacaaataagactttttccaacaaacccatgccggcacgccccgttgtatgaaaacggattgcaagcaaaatgtctttatctttaacgcctaattgacgttctgcaaagtaggctccacaaggggcgtgaagcagctcgtttccgtattcgccccaatgaggctcatgtagcttgtttcgaacaatgtcttgcatcgtttgtacatcgtggtatttacaaatatcatgaagaatcgctgcaagttcagccttcgattcatcagcaccatattgcttagcaagggctagcgccgtatcccgaacgccgagagtgtgggtataacgcacatcggtcaaatgctgtttgacttcatggagtgcttcattcgttgttatcgccataaagattccgctcctcaatcaattgttcaactgccggcgtaacaaaatagcgaatcggtttgccttttgcaagccgttcccttattagcgaagaagagatgttgacttcgacaaacgggacgaaatggacgtccggctggcttttcgcgcttgcaccaggacggttaaaggcaacaaacgtcaccaattgtttcagttcatcgatcccacgccattctggcaacatatccaccatgtcgcccccaatcaaaaaaaagaactcatcgtcagggtaggtttgcttcaactcgcgaactgtatcaatcgtatatgattttcctttgcggattagttcgatgtcacaaacttgaaagcgctcctcttgaacgagagcagctttcaccatgtcgtatcggtctttgccagacgttaaaccggcacgctctttatggggaggtgtcgacacaggcacaaaccagacttcatccaatttgactgccgttaatgcctcttgcgcgataagcaaatggccgagatgaggagggtcaaacgtgccgccaaataatccaatccgcttcactcttacctcactcctctgttaccggccaggcaactcgatctgtttgttttcttttgacggtttataaagaatgatcatattgccaatgacttgcacgagaaaagagcgtgtctggttgacaatttcttccgcaacgtgatgtttatcatcaaggcagttttgcaatacgctaattttaattaattctcgtgcttcgagggcttcgttgatttgcacaatcatgttttggttgacgccccctttgccgacttgaaaaatcggctggaccgcatgtgacttggcccgtaaaaaccgcttctgtttatttgttaacatttgctagtacctctcccattaagttaaatgcatacgaacaacgtgttccatgcatttgcggtttggtttgcgccctgtccagtgttcaatggacaacgctccttgattgacaaacatgccaatgccatttaaaatccggtttcctctttgtttcgcttcttgcaaaagcgctgtctcatatgggttataaattaaatcactaacaatcgttgcttgtttcagtcggtctaaagcgatcggctgtttgctcgtatcagggtacataccgactgaagtcgtattaattaatacgtcgtatgttccgagcgttgattccgcctcgttaagcgggattgcctcaatagtcaaatggctaaacagctgcgccagctcctgggctttttccgccgtccggtttgaaacagaaatagtggcacgttgtttgccgagggcgtggattacagccctcgccgcgcctcctgcaccaatgacaagcacacgccttcctgtaagcgattggtcgcttacaaccggcagaagggattcgatgtaaccatccgcatctgtgtttttgccgacccaacggccgtcctgacaaacgactgtattgaccgcccccatcgcttcggcatcttcatcaatttcgtctaaatagtcgatgattgcgactttatggggaatggttacgttaaacccgtcgatgccttgcgctttcattgtacgtatagcatttcccaattcctgaggagaaatgtcataggcacaataaacagcgtctaaccccatatctttgtaggctgcttcatgcatgactgggcttttgctatggcctagtggatgaccaattaaaccaaattggcgggtcatttcctccacctcctgctccctttttacgtatggatagaacggcgaatcgctacgccgacttcttttggggcgtgtgcttcaacgatggcgccttccgtctgaatccgaatccatcctaaccctgagaagacaatatccattggctctttgccaactttaaacgaatgcttcacgagtgggcgaacttgttcaccatcttctttatacggagggacaagcagttcgcctccatgcttgctgtacaagtcatctgctttttccattttggtgcggtgaatatgcaaacgatttgccgcataaacaataaacgaggaaggcggcccctttacaaaatcaaatcgggctaagccccctaaaaaaagggtctgtccttcttttagttgatacacaattggtttgatttcttttttgggcgtaatttcctttagcccttttacactaagcaaatgggcatattggtggcgattaaccagtccaggtgtatccaccaacgacttgccatcgcctagaggaatatcaatcatcgccagtgtcgtccctggaaagtgagaagtcgtaatcatcgcttcacccgtttgtccatgcatagcgaggattcggttgataaacgatgacttgccaacattcgtacagccaacgacataaacatctcggcctcttcgcatgtcgtcaatcgttaaagcgacatcatcaatcccttccccggtcacagtactcattaattttacttcaagtggctttaaccctaagtcactcgctgattttttaagccagtttgtcaacttgttgcggttcgtcgatttaggaagaaggtcaactttattagccacaagcaacacagggtttttaccaacaaaccgttgggcccctgaaatccaactgccatagaaatcgacgacgtcaacaacttttacaattaatgcctttttatggtgaagggacgcaaacatcgcttgaaaatcttcatcgccaattgaaaccggctcaatttcattgtaatgtttaagcctgtaacaccgtttgcaaactactacgtctcgctttaaagccgattctggtgcgtaaccaagctttttcggatcttccgtttgaatggagacaccacaacctgagcagtgccattcttccttcgattccgtcatgcctcatcctcccaatgtatgtacccttttcttctcatccattttaatacaatccgttcaacacgtcgatttacttttgtcatccaaccatcggtgcttgcaacaggcacgaccaaaatcgtatacagccccgcacggttaccgccgagaacatctgtgaatatttgatcaccaataacgactgcttcatcagtacgaacccccatttgtgagcacgcctgcctaaacgctcttctcataggctttttagcgctatggataaaaaccactttctcagggtcacaaaaagtttttacccgcttttcattgttgtttgacacaatcgttacgtgtaagcctgttttttccagttctttcaaccattgtttgacttctggtgtcgcgcctggccggtgccattcaactaaagtattatctaaatcggtaatgaccgcttttattccacggtcacggagcgcattcaagtcaatgtcataaatgctttttacgtattgattagggagtaactcgctgaacacatcagcacctcatttctaaacattccacattcactaaccaatcatcaactataccgttcatcccccattttatcaaacaaaacccttttttataaagcttcttattcatgattcgacaaaaaccattacgaacgaaaaacttttcgacaaatacacccatgcccattcctgtggataactttgttcactttataaacacttgtatattagtagtttgagacaaaaacccacaaaatgctaacaggttatcaacgagtccatgtggataaacgaacggttgttctagttcctgatacatgataggatttgattaatcatataagtgattgttaaggtcgcggtcatttctatcgacgaggaggtgaacctgctgacgctttagcgggggacaatggaaaatttatcggacgagttgctaatcgaaacgtaccataaagccattgagcttgaacttaaccaagacttcattgatttgattcacgatgaactccttaggcgttcattaacggacaggattaaactctcttcataaagattgatagaaatcgcccgccttgtgtgccttgaagaaaaagacgacttttaaaagtcgtctttttcttctgtctcttttggcaaaagctttatatattcacgcggcgcaaattcaactgaatcatacccttgtatagtaaagccttcccttttttctttccacgtatcctgatccagccaccaactgcctagaaaaatgatcgtaaatacgcccccacataagatccctttcgtttgagttcgaatgaaacatccccgccttctttttttacatatagcgtggtctgattaagggtcgatttatacattttaaaaattaataacaaaaaatttaggctccccttacgtcttctatcctatttaatagataagtcaaacatcgtaaatccttggtatactaagggtgcacggcttttttttttgcgttataatggctgagatcgtactaaatcgattgttcctattttcatttcaaaggaggtcaggcatgtccagtttacatatcgccatcctcattccatttatgatggctattcttataccaatcatttacccgtatacaaaaaaaatccatactggttggttcgttctattggttccaactgccctttttctgtactttttaacgtttttaccgacaacgatggaaggcggttacgagtacgtctccctttcctgggttccctcactcgggattaatgtcgatttgtatgttgacggccttagtttattatttgccttgttaattacagggattggtgcattggtcgtattgtattccatttactacttggacaaagtgtcagaacgccttcatcacttttacgtttacttgctcatgtttatgggggctatggttggcgtcgtattgtccgataatttaattgttttgtatatcttttgggaactaaccagccttgcttcagcgctgcttattagctattggttccatcgcaaagcgtccgtatatggtgcccaaaaatcaatgttaatcaccgtgttcggtggctttgcaatgctagccggcttctgtattctctacggtatgacaggcacattcagtgtccgtgacatcattgcgcaaacagaaggcctggccggtagcacactctttttagcggcgatgattttagtactgcttggcgcttttactaagtcagcgcaattccccttccatatttggttgcctgatgcaatggaagcgcctactccggtgtccgcctatttgcattcagccacgatggtaaaagcgggcatttatttagtagcccggttaacgcctgtgttcggcggcgacgctgtatggttttgggcattggtgattgcagggcttgttacactgacgtacggatcgattacggctgtgcgccaaaaagatttaaaagggatcttggcttactcaaccatcagccaactagggctgattatgagtttgcttggagttgggtcggctgccctttatatggaatcaggagaaggggccgtcttttattcactagctataacgactgcagtcttccatttgctaaaccacgcgacttttaaaggcagcttgtttatggcagttggcattatcgaccatgaaaccggcactagggatatccgcaaattaggcggattaatgacgatcatgcccatcacttttgcgatttcagcaatagggctggcttccatggctggattgccgccatttaacggctttctatcaaaagaaatgttttttacgagcttgctacgggcaactgagggcgatttcttttcattgggaacgataggctttctgcttcctgttattgcttggattgctagtgtatttacatttctgtactgtgcggtcacatttttcaagacgttcttcggaaaattcgagcaaagccattacgaaaaaaccgtacatgaagctcctttcggaatgctgattagcccagtgatcctagtagccttagttgttacgctcggtatatttccaaacatcgtcgcccaatcgcttgttgctccggctgtcactagcatactcccccgtttttctgtggacgagcttgacatcaaattctcgctctggcacgggattaatacagaattgctaatgacattggctatcattttttgcggaagcgtactcttgatcacgatgaaaaaatggtcgcagtttaacatctataaacgtgaaagagacccactccattggttttacgatcaaggcttagacggtcttattcacttttcgcaaactgtcacaagagcgcaaatgacagggttgctaagggattattttgtttatatgtgtgcatttatccttttgctcctcggttggacattttggtatgctgatgcatggtcttttaacataagtactgtagcgacaactccgttttttgtctatatcgtaacagcagtgtttatagtgaccactttgtgcctaccgtttattcaaaaacggatgacattgattatctttgcaggaatcatcggctacattatggcactctattttgcgatgtttcgcgcaccggacttggcgcttacacagcttttaattgaaacggtaacggttgtcctattaatgctcgcattcaggcacttgccagaaatggcgccggaaaaggcggctccttcaaagaaactgggcaatattgtgatttcagccgctgtgggggtgaccattacggttgttggtattagcgcttattcgctaggcaccgatgctaatttttcttcgatctccgactattacatcgaaaacgtttataaacttggaggcggaaccaatatggtaaacgtcatcctcgttgatttccggggacttgatacgatgcttgaagtccttgtgcttggcattgtctcacttgccgtcatcatgttaatcaaacaccgctttaaaggaggggaagatgtgtgaagtattccaaatcccatgacgtgcttcagcaaacgcttattactgtagccgcctattttattctcgcctttgccttttacttgttttttgccggacataacgatccaggtggtgggttcattggcgggttaatggccgcctgtgcctttattcttatttatgtcgtttttgaccgtaaaaaagcccacgaagcgatcaagatttcatttgtgccatttattgcgattggcttgttgctgactgctgcggttggttttatcggcatcctgtttggccaagcctacttggaacatttctttgattacttccatttcccttttttcggtaaagtcgaattaacgacagcgttgcctttcgacttaggtatcttttttgtagtcgtagcgatggcaatggttgtaaccctaacgattgcggaggataaaggctaatggaaattttaatgtttatcgtcatcggcgttcttttcgcgatcggcacttatcttctgctagcacgtagcttgcttcgcgtgattgtgtcgttaatgattctttcccatggcgcccatttgctgcttttgacgatggctggtctaaatgccgaagctccaccacttgagcatatggcagacggtggctacacagacccgctcccgcaagcgcttattttgacagcgattgtcatcagttttggaatcactgcctttcttgtagtgcttggctaccggacatacaaagtgcataacaccgacgacttagagaaattaaggggttctgccgatgaataatatgctaatcattcctgttattttgccatttgccattggagcaacgttgattttatttgccaactatcgcaaggtgcagcgcttcattagcttgcttgcctctattgcgatattggcaagcgcgctgtttcttgcatatgacgcttatacaaatggcattacaacactcgagttcggaaattggaatgccccattcggcattgtattcgtatcagatttgttttccacatttatggtacttctctctgctattatcgggctagtttgtttgcttttcgccttttacaccatccatcctgaacgggaaaagttttatttctaccccttttacttctttctgttgactggagtaaacggcgcttttctcactggggatttatttaacttgtttgttttctttgaagtgatgctgttgtcatcctatgcgttaatcgttattggaggaacaggctaccaattgcgagaatcgtttaagtatgcagcgatcaacgtatttgcttccatcctctttttagttggcgtcgcctacctttatgggattacaggcacgttaaatatggcccacttagcagttcggatcggggaaatggaacaaacaggggctttgcaagtggtagcgatgattttctttattgtatttgcgatgaaaggagcgttatttcccctttatttctggcttccccgctcctattacgggccgccagctgcgattgccgccctgtttggcggattgttgacgaaggttggcatttatgcgatcatccgaacatttacgctcatttttacaaatgatccaggatttacacatacgtttattttatggattgcaggattgacgatgttttttggcgtccttggagccgtatcgcaatttgatttcaaacggattctttcctaccatatcattagccaagtaggttatatggtaatgggccttggcctctatacacgagccgctattgctggggcagtcttttacattgctcaccatatcattgtcaaaacagcactttttctgtttgctggagcaacacaaaaagtgacaggcacaaccgatattaagcaaatgggcggcttgctgaagacgcacccttggctagcgtggctctttttaatctgcgcattatcccttgctgggattcctcctttgagtggctttttcagcaaattcccgctcatcttggaaagcttagtgatcgaaagttacgggattgcctttgtcgcgttgctcgtcggcttattgacgttgttttcaatgatcaagatttttgtatatgcgttctggggaaaacaagcacatacagacgaacaggcctctatttccgtaacaaaactcttgctgccaatcgttccactggtgatgttaacgattgccctaggcgttgctgctgaacctgtatttacttattcgcttgctgtagcagaccagctactcaatccggaaatttacattcaatctgttttgggagagtgagaaaatggcgtttcaattaatcataaatacgttagttgcgtttttgtggatgctctttcaaaacagttttaccgcccaaactttcgtttttggttatgtcatagggatgcttgtcgttctttgtttaatccgttttaaaggccgctatttttacatgcttcgcgtttggtcttttttaaagctaatgggtgtgtttgccaaggaattgacggttgccaacctggatgttgccaaaattgtcatcagccctaaaatgaacattgctcctgggatcattgccgtgccaactgaactggagacgagggtggaaaaaacattgtttgccgtcatgatgacattgacaccaggaacgatgtcgattgagttttcagaagacggtcgctacatttttgtccatgccttaaatgccgaagacaaagatgggctggtgaagcaagcaaaagatacatttgaggctggcattttggaggtgacccgtcgctatcatgtttaatttgttgctctctattgctttagtcatactaagcctagccgcgctcctttgttttgtccgtgcccttcttggaccaaccaatcatgaccgcattgtggcgcttgataccgttggcatcttattaattggctttgtcggcatcttaatgattcttcaagacacacgcgcctataccgaaattcttctcgtcgtaggcattctcgcttttgtaggctcagccgccatggcgaaatttcttgaaagggggaatttgtttgacgacgattgaatggctaatcgcagttttggcattactaggatctattttcggcttcctttctgctgtcggcatcgttcgattgcctgatgtgtactcccgtctccatgcgacgggaaaaaattcgacatttggcattatgatgatcatggccgctgtattcctctacttttttatattaaaaggcgagtttattggcaagttgttgttaacgattctatttgtgtttattacggtgccgattgcagcattaatgatttctcgatccgcttaccgtataggcattccgatggacgcttccactgtttgtgacgaaatgaagcctttttatgacaaagaaaagaaaacatatgcgaacaacagcaaacagacaacaaatgaaaatcctacaaaaccattacctacagaaaataggccctaaataaaaggacacgtttgatgacaagaatagtgctgaatttggggaaaaacgttacaaagtgattaaaaatcaggtgttcagccttattttggcctttaagtcttgacacaacaaggattcatgagtaaattaagggcaggcattgtcgctataagccgcacacagcgaatatagcaatatgttggtctgtaagaagaaaagaatgaaacaactttacgataagaaaaggagttttttaagatgaacaaaacagatttaatcaatgcagtatcagaacaagcagaaatctctaaaaaagacgcttccaaagcagttgacgctgtttttaatggcattacggaatcactcgtaaaaggagcaaaagtacaactcgtcggttttggtagctttgaagtccgcgagcgttctgctcgtaaaggccgcaacccgcaaactggcgaagaaattgaaatcccagcaacaaaaaaccctgctttcaagccaggtaaacagttaaaagacgctgttaacgagtaaaacaacagcaaacacatagattccactaggggtgcttcgtgctgagaaaaggttcgcctttaactcttcaacctgatctagttcatactagcgtagggaagtggaaacgtaaaaaatacatttgttttttttacattacaacagtcgcctccacaagtacgggcggctgtttttttattttagacagaaaggatgatggcgttgtcgacgatttatcgcgctttaacgatcgctggaaccgatcctacaggaggagctggcattcaagccgatctcaagacgtttcaagaactagaagtgtatggaatgagcgtgattacctcgctagtggcgcaaaatacgacaggtgtgcgggctatccaccacgtaccccttgaattcatcgaccagcagttccaagcggttgtcgatgatatttacccaagcgctattaaaacaggcatgatcgcgctcccagaaatgatggaactcctgcaacaacaactacattcccacaaaaacgtcccttatgtttgcgacccagtgatgatggccaaaaacggcgacccattgctagaaaagcatgtgcgcgctaagcttcgcgagacacttgtgcctttagcaacaattgtcacacctaatattgctgaagcggaagatttaattgacatgcaaattgatgatattgacgatatggaaaaagcagccatacggattgttaaagaattaggggcacaaagcgttgttgtaaaagggggaagtttaacaggcgatgcggttgatgtgttttacagtagagagactggattgtttaaattagatgcgccccgtacggatacaaaacacacacatgggacaggctgtaccttctcagcagcgatttgtgcccaattggctaaaggcatagcgctattggatgcagtccaaaaagcaaaagcttttacagcagatgccattacttggtctttacaaattgggaatggctatggtccaaccaaccattggggtcatcgacttaatgggttaccaggcaaaaacgttaaccaataagggaacgattcccgcgtttatttgtcaaccaagcgcatgagagaatatggtccagtgcaaaggctcgatacgcattttttaaatggcaataacaaaaaacatgcgtctcggtaacggtgtatactgtaacttccctttgggttagctttttattttttgcttcatagatgagttctacccgcccttgctcagtagcagctctgtttaataaccggatcatcataatcacactccttttgattattattataacgatcgaacgaatgttcgtcaacaaaaaacagaatgtttgttcgttgtattttctcccgcatcttactaagaaagatgcgggctttctgttttaacaatcattcattgtgggtaaatcctccttgcctctcattccttcttcctaagttcaactatctattttcatcgctttttgttcgagttcatagacgcatacatgggagttaagtataatgggaaaagtatttggaaatcacctcccaggttataaacgcgaataaatgggtaagtaaagtttattccgtcatcacagttgatttaaaacaaggagcgcatcaatgaattcaaatgacacacgaacgaagattgaccccgtattttactgggtgcttggcatcctccttatctttattgttgttggcatctctgctccagcgcgccttgaagcgattacagccgctgcccaggcctttatcgccgatcggtttggctggtattatttaatcgtcgttaccttctttttgcttgtatgcctcttttttatctttagcccttatggaaagatacgtttaggcaaagatgaagaccgtcctgaatacagttacttaacatggtttgctttcttatttagcgcaggactcggcgtcgggcttctgtttttcggagctgccgaaccaattgctcattatgcagtgagctcaccgactgtagaagaaggaacgggagcagctgcgctagagtccatgaagtacgtatttctccattggggttttcatggttgggccatttatgcaattgtggcgatttgtttggcttactttaatttccgcaaagaacagcctggcctgattagcgcagcgttgtcgccattaattaatccaaatggcttctttggcaaaacgattgatgtgatcgctattattgccacattgtcaggaattgcaacgacgctcggatttggggccgctcaaatgaacggcggcatttccttcctgacaaacttagaaaacagctttatgctccagttagcgattattgttgtgattaccgtgctctttcttatttcagcaagtacagggcttgataagggaatccgcattttaagtattgtcaatatgacacttgtcgtgcttatgttgctgtttttcgccgtgtttggtgcaaccatgtactcgttaaaccttttcacaaatacacttggccagtacatacaatccttgcctgaacttagttttacgattgcgccaaacagtgcagaacaccgtgcttggattaacgcgtggaccttgttttattgggcctggtggatggcatggtccccttacgtcggtacattcattgcccgtgtatcgcgaggacggacactgcgagaattcgtcattggcgtattgctagtcccatcgctgctaggctttgtttggttttcatttttaggggggacatcgattgctgccgagtcttcgggggctgccgctatttcaacattagctgatgaagagatgttgtttggcgtgctaagtacaatgccctttagtaccattacatcctttataacgatctttttaatcgctgtattttttattacgtcagctgattcagccacatttgtgctaggtagccagtctacaaaaggatcattaaatccagctaacaaaattaaaataacatggggcctgttaatgtcagcaacggccgctgttcttctctatagcggcggcctgcaagcattgcaaaacacaatgattgtcgtggcgtttcctttttcgattatcatcgtgcttatggtcatttctcttttaaaagcattgcgccaagaaagactaaaagagcaggtcaaagagcggcggctacgtcgtgaactcgttgagctccgcaacttcaaaaacaagcatgaacgtgaagagaaaaaacgtttaaaacaggaacaaaaaaaacagcacaaacgtgccgtgccaaaaagcaatcatcagaaaaccaaaccaccaaaaaagaacgattaacaatcgatacagacaaaccgtcaccaataaaacagaggccagcgttcgctggcctccattttatcttcaagtcgcttaaatagacgtcgtctgctttgtctctgtccacgccttcttccatgagtgctgagcaaacagtaacagcccaagggcgaaacaggcagaaagggcgaacagaagaaatccgctagcgtacgtccccgttatatccttaaacaagccgagaatatttggcaagaaaaagccgccaacgcctccagcagctccaacgatgccagttaccatgccgatttctttatggaaacgctgcgggacaagttgaaacacagcaccgttgcccatgccgaggcagcccatgcctataaataacacagtaagagcaaacgcaatcggcgggagaaaactaacggcaaacatacaaagggctacgccaacaaaaagcacagtaagcaagcgagcaccgccaattttgtctgcaatcaacccgccaattgggcgcaataagctgccggcagcaacgacaagtgtgacaaactcccctgctctgacccctgaaacagcatactggtttacaaagaaatagcttaaaaagcttgacaagcctacaaatccaccaaatgtaacactgtaaagcaagcaaaagtaccatgtatcacgctcttggaatacacggaaatacgcttttaacggctttggagctggctggtttggtggctccttcgccatcaggatgtaagagatgagcacaagggaaagaggaataagcgctagtcccatcaccccattccaaccaacaatttctgccagccttggcccgaacaatgtagcaaataaggtaccactatttccggctcctgctatgcccattgctactccttgtaaatgaggggggtaccaccggctagccattggcagcgaagcagaaaaactagcacccgcaacgccaagcagcagcccgatcgcgatcaattctgacaagctcgtaccaaatagccagccccacaacagcggtaccatcgttacaaccatgcctgctatgctcgtcttttttggcccataacgatctgtcaaaatgccaacaaggatgcggaaaacagagcctgctaaaatcggaatcccgacaatgaacccaatttgtgaagcactcaagccaaaatcagcagtaatgtatgcgccaagggcaccaagcaatacccaaatcataaagcttacatcgaaatataaaaaagcggaaaacaacgaaggcgcatgcccgcttttgcgtaactcagaaagtttcatgttcccaacactccttccatttgctcatgaacaactaatggttcagcccttactgcgctgactttaaaagctggcatgcggcaaacagggtctaaattgcctgtaattatacgattgacgttttgtttgccactccagtgaaaagggacaaatacagtatcttcacgaatcgtttccgtaaagtgacaacggacgatcatactgccttgtttggtagtcagcttgataagcgttcgatcagcaattccatgctttttagcggtttctggatgcatttctacaaaagattcaaagtttcgtgccataagggaggcgctatttcgtgtctgtacgccagtcaaatagtgagcaagcactctgcccgtcgttaaataaagagggtaatctcgacttggtttttcttttggtacaggcgcgtcgttcggaacaacggtcataagcgcttttttgtttggccgataaaaacaatccgtaaataacagtggcgtccctggatgttccaggctagggcatggccaaaaaatccccttttctttcctaagccgctcatacgtaattccatagtaatcagcgattccacctttgctggccattcttaattcagtaaaaatgtcttccgagcaggaataggaaaaatcagttcctttgccaagaacagccgcaatgttacagataatttgccaatcatggcgggcttccccataaggaggcatactggcttcacgcagtgtcactctgccttcgacatttgtcatcgtgccttcatcttccaaataagaagtggacggcaagatcaagtcagcaagctgagctgtttcagaaacaaataagtcgacagcgaccagaaattttagcttttttaaagcatttttgacaaaatcggcctgtggatgggatacgaccggattggagcacattaaaaacattccggtaatttcccccttgtctgcttttttcatcatttcaaaagccgagacacccttccttggcaactgttcaggtgaaatcccccaaatagcggcaatatgagcgcgatgctcttcattttcgattgaacggtatcctggaagctgatcggctttttgaccatgttcccttgccccttggccattactttgtcctgtaaccgcggcaaatccacatgcgtgtttgcctaacttccctgtagcgattagaacattcaggaaattacggacagccatggagccgtttgtttgctgctcaacgccccttgccgtaaaaatcatccctgttcttgccttagcaaacgtttcagcagccttggtgatcacatcgccgctgacccctgtttgctcggctatgttttcaagtttgagcttggcaatatgggctttgacttccgcaaacccttcaacctgtttttggatgaaagcggcatcttcgtagccaccttctaagatacatttcaataacccatttgctaaagcagcgtctgtaccaggttttagctttatatgcaagtcagccagctgtgcagttgccgtttcccttggatcaacgacgataagaaaagcgccgttctttttcgcttgttcaatgtaaggcatcagcgttggttggcattcagctaaattggtccctaccaacatcagacattccgcaaacagaacgtcttcaagggaattggttaagcctctatctattccaaatgctgttgtagcagcggaggcagcagccgacatacagagccggccattatagtcaatatgccttgttttcaaggctacacgggcaaacttaccgagcaaatatgcttcttcatttgtaattgaggcgcttccatatacggccattgcatcatgcccatcttcttgctgaattgcttgaacgttttcggcgatttgtttcagtgcttcatcccaactaatcggcagccattttccatttactttggccagcggttgtgtaagccgatcgggatgaaaggcgtgttggtgagcattcagcccttttacacataaacggccttttgacgtggggttctctatgccaacaacgtcgtatgatgtttcctgtccatgcttacgcttaatcaattgcaccttgcattgtacactgcaaaaagggcattggctgttatagacgatttcacgattaggcagttgtcttttttcttgcaaatatcccgactgcattcgagtacaatccctccactccaaatttttatctctttaaacgactggcattcgttctgcatgctcatggctaactgccgttatttccgctagctgtttatttaattttgcctggcaagcagcgtcaaacacgacttcgcgaacatggaccgcgcctttacggacaagccaagcatggatattttcactgtactgcgctgattgcctaaagtattgcagcaaagcgcaaacaagttgaaaggttccttcaacggagtcgttcgaacaaaataattcagaaccaatcgctacttcccaatttaatggcgaccgggagagacgaatagcagcgagctcgtgtcgacgagcagctaacgtaacgcatacttctgtttccataggaaaaggcacacagttaaataaatcgagcagtctttcagccaagtgcctcccttccggccagttatagtggctgtcatcaataacaacctgcaaacgcttgcctgccaaaacagcaggaggcatatcaagctgttcaaagacgtaaggcagttgcttttccgtcaaccctttcagctgcacttggttacgtgctgaaaaatcaattctcggcacttgcagttcctcagccattagggcaaattgttttaattggtcagtgctcaatctgccagcaatgtgtggaagtgtaatcgtataactgccatcgttttcttgttttccattccgttcctttggtgctcccccaggaaagaacaatccggcataataagcagacacttctcggcagactcggcacccatttttgtttttccaacctagcttttcgctcatgtcagaaaacacaacgagccgtttctcggcgattgattgggcgacttgttgttcggttagcgacgtgcatgggcacaacggttttctttcggctatatcgacagtcgctagcagctgtccatgcttaaagctttctagcatagcggccactctgacctcgcatccaccgcatgaacttgccgctttcgttcccgcttttatctgtgcaattgtgtgctgtccggctgccattgcgctcataatgtcgccctttgatacagcattacaattgcaaatgagatgggaagctggcagagaggctagctctcgttcaaatgctgttccatcttctgttaatagttgcgtcttctcgtcatctgacaatggcgtgtttgcccgaatcaactgcaacagctggtcgctttgtcgcgtattgccaaacaatactgccccggcaaggcaattccctttaaacagaagcttcttatactgacccgtaatttcgtttaaagttttcaaaacagtacaagtgccagaacagattgtttcgcctgcagaaaagacgtttactcctgatattttcaattgcgtcgctaacacagtgccgttataatacaggcctggcagtccacaaagctcacgggccagcacttttgcttgttcatataagggggccactaacccatagctgattccgttatgttcggcacattcgccgacggcatacacacctgaaacgtccgtgcgtagacgatcatcaacaacaattcctcgctttgttggaatgttgctttccttggcaatggcaatgttcggctggacgccagctgccatgacaacaaaatcagcagaaagagtggttccatcttgaaaacgaagacctgttacccgctcctcgccgctaatttccgctgtttgtttttgtaacagaaagtgaatccctttgctctcaaggctctgtttcaacagccgggctgccgtttcgtcgagctggcgctccataattcggtcagaaagatgaatgacgcttacgtcgacgcctaaatgagccagcccttgggctgcttcaagaccaagcaaaccgcccccaataacagccgctttttggtaacgagtcgcccattcagttaaccgttcacaatcacggattgtgcgaaaaacaaatacgccttctttctccactcctggcactggaaggacaaaaggttccgaaccagtagcgatcactagcttgtcgtaagcaagttcccctttgtcggtatatactttctgggcaacgggatcgattctggtcgctttctcacctaatcgcagctcaatgccatggtcaacataccattggaacggatggatgccgatgctgtgaagcgtctgtttcccttgcaaaacggaggaaagcaagatgcggttatagcttgggcggtcttcttctgataaaatcgtaatcgcaaactggcgcggagcaagttttaacacttcctctaccacgcggacgcctgccatgccattgccaataaggacgagtcgctgtcttgacttcgagcccatccaatcactccttttaacaagcattaaataaacacgtaaatatcgtctccttcaactttcacagtaaaacaagctacatttccttggtctccaccttgcgcgctgcccgttttcatgcaaattttccaatcatgcagcgggcaataaacataatttccactaacgatgccttcggacagtggcccgcctttatgaggacatttattgtcaaggacccggacggacccatcctcttgcataaataaagcaagctccctcccttcgatttcaactttcttgcctaaaccgaccgccagctcatttcggttagcgacaaacacttttctacccgcttccacgaatgccatcacatacctcctccctgtttaacagcaatttttttcttttcaaacaattgattctgcttttcttcactctcaacaatttccgtccacggatctttgtgcctagatagcgccatttccatccgttcgattagcgctgctcgttcgatgctgtcgtcgaaaatcacttttttaattgattcaagcccgactcgctcaatccaatgggaagtccgttctaaataggtggcttgttcccggtaatattgcaaaaatgcactgatcgtttccattacttcttcattcgttgccactttgcaaagcagctcagcgcttcttaaatcaacgcctccattcccacctacatagatttcccatgctccttctacacccacaattccaacatcttttattcctgattccgcacaattacgcgggcaagcggaaacagccatttttactttatggggcgtattcaggccctcgtattttttttcaatttcgattccaaggctaatcgagtcctgcgtgccaaaacggcaaaaatcttcaccaacgcacgttttgactgtccgcaatgttttgccatacgcatagccggagcgcatccctaaatcacgccatacgttaggcaatttttctttttcgacgccgagcaagtcgatccgttgaccgccggtgacttttaataaagggacattgtatttttcagcaacatcagcgattttccgcagttgttctggattggtcaccccgccatacatccgaggcacaacagagaacgtgccgtctttctggatattggcatggacccgttcattaacaaaccgggaatgagcatcatccgtataatcaagggggctaatgagacctagatagtagttgagagcagggcggcactttgaacagccttcctctgacttccaaccaagcacgctcatgacttctcgaacataggacaagcccatttcccggatcgaggctaccactgcttcatgggttaattccgtacagccgcaaagaggttctggttttgccattatgtccgttcctgttgtgagtgccaacaattcagctacttccggcttgcagccaccacaagaccttgacgcattcgtacattgccttatttctgctaccgtagaaagcccctgctctttaattgcacagacaatctcacctttgcttacaccgttacagccgcaaatcgtttcttcgtctgccattgtagctactactgatggactgctgtcattcgtctcagatgggaacagtgccgctttacttatggccgaaatgtcttccccagaccgaatgagagaaagaattcgattggcatcattggtgtcgccaaataagacggcccctacaacttgattgtttttaacaactagctttttgtagactccagcaaattcgtcatggatacgaatcgatttcgtctcgtcttgatcgcgaaacgcccctgcagaaaagacatttacccctgaaacttttaatttcgtggagacgattgaccctttatagccgctgacctcgttgctcgtatttgtacagatgtgttcagcaagcactttgccttgttcgtacaagggagcaacaagcccataaacgataccacggtgttcagcacattcaccaactgcatatacatcttcttcgctagtttccatataatcattgacgacgattgcttgatttactttaagtcctgattgcttagccaattgaacattcggacgaatgccaacagccataacaactaaatcagcttttatacttgtttggtcactgaaggaaatgcccttgacccggttgtggccattgattttgaccgttttcttatttaaatgaaactgcatcccttgttgttcaagctcggccttcaacatctttcctgcacctgaatccagttgccggtccattaaatgatcggcaatatggatgacatcaacgtccatttttaagttcaacaggcctctagctgcttcaaggcctagcagccctccaccaatgaccaccgctttttgatacgatttcgcagcattgatcattgattcgcaatcggcgatgttgcgaaacgcaatgacaccttctttctctgctccaggcaaagggagcataaacgggtcggagcctgtggcaaagatcaaacggtcataggtccgtttaatgccactggcgctccacacttcttttttgcgacaatcaactcgtacgactgcgtcacctgtaaacaattcaatttggtttctttcataccagtcgtagtcgtttaagacgatgtcgcttacacttgcgtcgccttgaagaacagacgacaacaatattcgattgtaatttggatggggttctgcaccgaaaaccgtgaattgaaaacgattaggctctcgtttaatgatttcttcgagtgtgcggatgcccgccatgccattgccaattaaaacaaccttttctttattcacatctcaaaactccttttaaaaaaaaatccaattacctcgtttaagacattgtctgatcgagtggttgattgtgcagaacgacagaagcgtacatcgaaagagatttagcatatgcttgaacttgatcgctcgtcgttaaaataggcaatacagcttcatttgcacattctgctaaaacgagtcgcaaatcatcaatttcttgctctgtttcacaaaaggcatgagttaagtggccttcttctagcagacgacgaatcgcaacagttattttttgtggtaacaagcggcggttaatggcatctgtaccaatcacgacaggcgaaagagttgattttttcgaataacgcgccaattgcaaaccgagtgagcgagcgatttgctcccccccctgtgttcccgccataagttgcccttgtacagaacgaatatcatagcctttctcgccaagctttgctaaaaacgcgaacaacacctccttggcaaaaaacaagactgcttgatttttactagtttgaagcacagcagcgatgtccgtatcagtaacaattttccccttgttttgttggaggggggccgcaaagacatccgccccttgcgcccgcaacgttcccgtcatttcagtttctcctcttagcgaaagtattcccatgccagaaaggggcttgtgctcaaaccatgatacagccccacggacaccgacaacatcgccgattaaaataacagcaggattcgccaagttagcgttagcgacattggtcacaatcgtttctagtgttccttccacggaccgctgtcgactgtatgtgccccactcgacaatgagcacaggcgtaccggctggttttccatgtgtcattaactggtcaacaatggcagctaattgtttcatgcccatatagatcattagcgtgtcaaccgattgagcaagtgctcgccaattagggggctcttttttttcgtctctgtcgcgatgagcagttacgactgcaaatgaactggaaagcgttctatgggttgccggtacacctgcataaatagaagcggctgtacccgctgtcacaccagggacaatctcaaatggaatgtggtgagtttttaaataagcagcttcctctcctactctgccgaatacggcaggatcgcccccttttaagcgaacaaccgtttttcctttttttgcgtggacaagcatttctgtttggatgtctccttggcgcaacacatgtttacacggctgcttgcctgcatacaccaacttggcatgatcgctaacttccatgatgagcgccggattggcaagcctgtcaaaaatcacaacgtcagcttgttgtaatacctttcgtgctttaacagtcaacagttcggcgtctccaggccctgcaccgacgaggtacacttttccttgtatggacatgtaaaactcctttttgatacctaaaatgatttcccctagtctaacgtggatcgtttttctactggcaccgattgtaatattttgtgacatactaacgttcgacaaaagtcgccgctgacccgaacagcattatcccgcttctaagtaagtatccgccggtagaaccggcggttttaatttcgccctataagggcactttaccaacgaagtccctaaagggacctctgaagggaccgccaaccgtttcctactttacttatctttaaatggtttcgttgatagaagttggtttggcggccaagttctattataacgattggagattttttcatcactagacctctctagaagtttcgttttcacacgtgcagagcacgtggtttcaaacccatattaatgaaaaacagggctaagcatggcttagccccgtgttcttatttttgactatttccttacaaccgttaaccttgaacctctggatttttttggacttgagaaacgtttttcttattgactaaagctaaaatgccggcaataagcaagaaaataaaagctagcgtaaaaaacaatccatttaaaaagaagcctgtaacagaaataataattaatgcaataccgctaatgactcttaacttaggtgcccatgataaaaatcctaaagcaatcgctaaaaaggatagccaaaacacagaggaaccatcatttgccattgcttcttctccaaaagcaaccccaccagccgtcacaagaaagccactaatgattccacaaatgcctccgagaatagacagaactgcaatccacgttttcattgaaaacctcctaaagttagataaatattgtaacagttcacgttccattttacatgcatttacttattttttccattgtttatttaaatttttccatgtttttatcaataaaggtccggccaaaaaggcttaacaacttacagtaacatattgctctttccatgacgaaatgcttttatccgcctcgttctcccaggggactggcgaaaaaatcacaggacagctctctcctcttttagctgttctaacatcaaacaatattgtttatttttattaaccatccaagaatcaaggcttttctcaccattacttaagttctaatttagattcaccactaccccgtccttttacatcatgctaaaattccatatataggggagtgtttatatgtataaaatcatttgcaacaataacggcaaactaaaagatttatgtgagtctaacagtacagttattaaaacgttcttgtgttacaaagaagctaagcgcctggctgagaaattaaactcaaataccactcctgattttatctggaccgttgtagaaatctaaaaaagacgagcattagctcatgcgcatcactggtttagaaatgcttcggttaacaattaaacccgttgacttccctcctcgttgaaaccaactttctcgtgttttcgtaaaacatagagaaaatgaggaggaagaaaaaatggacaacgagtacgtagtcggctggggcacccttgccttaattaatgctggccttgcacaaggaaagaaccgaacagggctcaattggttcttgctttcactgttgctaggaccagtggccacattaatcttgctatttgtcgaaaagcgtccgaatccgaatgattaacacatgggaaatgcaacccattttataagatggagcttctatcttcgctaaaacataccaaaagtgcagagtacattgctgcactttttttcgttcgcagctgttttaagaaataccttaaccacagcgtctcgttaccacgtacctcattcttattaattctcttttgattattttaggtagatagccaccacttacttctcctctaaaaaaggtcaacctatctgttaatccgtttcaatcgattaaacattggccctatccccttttcctatagccacgcaaccggaccgtcagcaaaacattccttcgtacagacacaaccaagcccagtgttgcatagatataaccattcttgtggaggtgagcttatgtccggcatcctcgctgcactcacatattttatgaaagaagtgtttgtttttgtttcctatgtcaaaaacaacgctttcccgcagccattaagcaaagaagacgaaaaaaaatacttagcccggatggcagaaggcgatgcttctgcacggaacatgttaattgaacataatcttcgccttgttgcccatatcgtcaaaaaatttgaaaacacaagggaagatgtcgaggatttaatttccattggcacaatcggcttgattaaagccattgaaagttattccgaaggcaagggaacgaaattagcgacgtacgcggcacgctgtatcgaaaatgagattttaatgcatttgcgggctttgaaaaaagttaaaaaggacgtttctttgcacgatccaatcggtacagacaaagaaggcaacgagatcacactgatcgatattctcaaggatgacggcgaagacatcgttgatgtcttgcagacggaaatggaaaaaaagcaaatttacgagtacattcatgtgctcgatgaacgtgaaaaagaggtcattattggccgattcggtttgaatatggaggaagagcggacacagcgggaaattgcgaaagaattaaatatttcccgtagctatgtctcccggattgaaaaacgggcgttaatgaaactgtttcatgagttttacaaacatagtcgtggccgcagttaaataaacagagatgcctgatattcaggcatctctgtttttcgcggcgtcatattgattggtagagcgcttaggcgccagcgactgccattttccaaacgaagccgccaatatttgttgaaacaatgtcccggcaatgacaggcaatgtggcagctggtggaaagtaaacaatcgcaatcgctgccccgataccgatattgcgcattcctgaaagcagcatcatgctaacctggtcctctttaggagagcctgtcgcctttgcaaaatataaccctgttaagtagccgataatggccaaagctagtaccgttgcaacaatcatggccagttttatatcaagcgccaaaaaataaggtgctgcgactgaactatttaacaggatgaccgcaagtaagccaagctttgtaaagggcgcgccgactacgtgtatgacgtcgacccatgccggttttgtagcgttaatagccaatgcggcaagggatggcgccacgaccatccaaaagacgcccataaaaatcccgaatgtatcaaggggcagctcggttccgagaaacacagctagcgttaacggtataaagatgggcgcaaccaatgtgtttgccaaaattaaacaaagcgccaacgaccggtttcccccataaatcgaaatccacatgagggaaacgatgcctgtaggaatggaaaaagcgagcaaaaggcctgtttgtgtccatacgtcatctggaaacaacaaaatgccagcaatataagcacaaaacggcaaaatgagctgcagcgagacaaaagttagaaaaaaggatcgtgggaatcgaaagacttgctttatttcccgcggatggattgtaatgctgtttgcaaacgacatacaggcaaaaatccatggcaccaaaaaggctgcaggttcgagcatttgattcgcaagtacgccagcaataacagctagtggtgtcatggctgggagccacttttgtaggaattggttcatcgctttgttctctttctattttccgctcgtactcgccgtttgatgaggctcattgcttcttgcatagcgcttctcctttcgaacgctctcttactgtttttctttccacgttttatattcttgtttaattgtttctagaagcgcttgatcagtcaacacatcaaaggccgtatgcgccatcgtttttgcgccaagcatcagcccttcaaatccttgctcgcttaatgcggcatcacggaattcaggcgtatggcacgcataaccgccatctgtaattttcacgtacggatggatggcaggcacgcgctggctgacattgcccatatccaacgagcctccaagtgttttttcgcgaatatcgtcgacgccaacgcccaacgcaaccaaattagcggtaaattgtttggatagcgcttcatttgtattcatatcgtcataggaaaactcgtagaacgaaatttccaactgtgcgccagtcgcaagagctgctgccttcgcacagtttttcaccttttcaagcaaaggttgaagcgtttttcgtgatgcagcgcgcacataaaattgtgctctggcaaaatcgggaacgacatttgcagcctgtcccccttctgggataatgccgtgtatacgcacatctggcgtaacatgctgcctaagtgcattgatttggttaaatgtcgctatgactgcatccaatgcattgattccctcatgggggctagccgctgcatgggccgcctttccaaaaaagtcgaactgaatggcgtccattgccaacgaagttccgctttcctcataatgggcattcggatggaccatcatggctacgtcaagatcatcaaacaatcctgcgtctgccatggtcactttcgctccacgtgtctcttccgctggtgtgccatagacatatatcttgccccctgttttatgcaaaacgtcactgagaccaatcgccgctgcagccgacatcgtgccaattaaattatggccgcaagcatggccaatttgcgggagggcatcatattcagccataaagcccactttcggcccaggttggccgctgtcaaatgtcgctgtaaaagccgtttctaacccgcatgttcccacttctactgtaaatccatgtgattttaataagtcagtcaatgttttgcaagcaataaactcttcatgtccaagttctggattgtggccaatatgctggcttacttcccaaaatgttaaacgaagctgttccagtttttcactaatttgttctttcatttggttctcctcgattcatcgtatctttattcgctacttgacatttatctattatactttatattaaaataaagttaaatataaattcatatgaatatttataccgataggagctttcaacaatggaacagaaagacaccagcaactcagaaaagacagcaccaatttcgaaagtcccccatacgtacgcaattttgtttgcaatgattgtcctggcagcgttagccacgtacttcgtttctccaggcgcgtttgagcgggttgaacaagacggacggacactccttgtcgaagacagttacacgccccttgaagcgagtcctgttaccccatttgaaatgtttcaagccattccaacaggccttatggattctgcacaaattgttttttatatttttctagtaggtggcacgttcggcgttattttaaaaacgggaacgattgacgcgactgtttatagtttgattggcaggctacaatcaaaagggatttatttaattccagcgatgatgattgttttttccattcctggcgcgacgattggcatgtctgaggaaattattatatttgtaccaattggcattgccgtagcgaaagctcttggatacgacaccatcactggaacagctatggtcagcctcggtgctatggccggttttgtcggaggcatgatgaacccgtttactgtcggcgttgcccaatcgattgctgaattgcctctttttagcgggatcgcttttcgtttcgctgtatttttgttgtttctaggctctgcgatctggttggttgtccgctatgctctgaaagtaacaaaagatccgtctgctagccttatgtatggctttgaatctgggaaacaggcaagcgcacaagcagccccgcgtttttctgggcggcacgcctgtgtgctagcaattattgctgtcggttttgcccttaatatgtatggtgtattccaatgggactggtatttaacagaaatggcagctatctttattattattggctttctcgtcggcctcactggcggacttggcgtaaatggtatgtttaccgcctttacggacggaatgaaaatggtcacattcggcgctctcgtcgttggttttgccagagcgattttagtggtaatggaacaaggccaaattatggatacacttgtttatcagctttccaattggattagcgtcatccctagccaactgacagttatcggcatgtttattttgcagttgattattaacttttttattccatcaggaagtggacaagcagcagtcacgatgccgttaatgacccctcttgccgacatgttggacatccaacggcaagcagctgtactggcgttccagtatggagatggcatcatgaacaccattaaccccacttctgcgccgctgatggcctttctagcaatagctggcatcccttatttacggtgggtgaaattcatttggaaacttgtcgttatttggtttgtgatttcagcgatcgctttgctagtcgctgtagcgcttaatatctcctaaaagattcgtctgcctgtttgccgctagccgtttgctagcggctttttccatgcgaataactcgatttccaggggccaaatcagtatactaaaggagatcgtcacacgaaaggagacatgaaccaatgaaattcattgacaatgcaggcattacagatccacgaataaacttagcgattgaagagtgggcgctaaaaaacttagacccagaagaaacataccttctcttctatataaatgagccttcgatcattattggcaaaaaccaaaatacgtttgaggaaattaatttagattatgtaaacgacaacaacctccatgttgttcggcgtttatcaggcggcggcgcggtctaccatgacttgggcaatttgaattttagctttatcacgaaagatgatggcgattcctttcacaatttcaaaaaattcactgagcccgttgttcaagcactgcaaaaacttggcgtaaatgcgcaattaagtggacgaaatgaccttcaagtaggcgaacgtaaaatttccggcaatgcccaatttacgacaaaaggccgtatgttttcccatggcacgctcatgctcaactcagagattgaaaacgtcgtttccgcgttgaaagtgaaagatgacaaaattaaatcaaaaggaatcaaatcgattcgcagccgagtagccaacattgctgaatttttaagtgagccactgacaatggaagaattcaaaacgatgctgttgcgttatatttttaatacgaagagcggcgccgttcctgaacatacattaacagagacagaatgggagcaaatccacgctttgtcaaaagagcgctatcaaaactgggattggaattatggcaaatcgcctgcctttgacattcaacgctccaagcgttttccgatcggttcgatcgatttgcgtttaaatgtgaaaaaaggcgtcattgtcgaatgcaaaatttatggtgacttttttggcgtagcagacgtggctgaactggaaaacaagcttgtcggcaaacgctacgatgcggacgaacttagagatgcattaaacgacacggaaattaaagcttattttggaaacatcgataaagaggatttcttatcattaatctattaaaattctgtagcaaaaaaaatggcggcctttaaggccgcccaattggggagagagacaagaaagaacaattcggaagcaagggttgcatcctttccttgtttctaatgtacttcacttctttcgtttttgcagcacaattgtcataagatctgacacattacttttgataaggagaataccggtgttaacaattgatgagattaaagccaaattgaaggcagcggacacatgtaacaagcaagtgggaagagaagcagccgtccttcttcccctcattacgatcaatcgggaactccatatcctctttcaagtccggtctttggctttaagagctcaacctggagaaatctgcttcccaggaggaaagattgagccatcggatcatgatgcaaaagcagcggccattcgcgaatgcacggaagagttaggcattgacgaatcggacattagcgtcatcgctgcccttcctcctgtacacacgccacagcgcacattcatctttccgtttttagcagaaatttcgtcaatagaagatatttctattaacgatgcagaggttgatagctggtttactattccagtcgcttatttactcagtcatcccccattgcaaggctatatgaatataacggtccaaccaggcaaaggctttccgattgaaaagatagcaaaccgagatgcttacgaagggcggatctaccaaatgccagaatacttttacgaatacaacgactatatcatttgggggttgacaggccggatattaaaacactttcttgacatgcttgaaccatgagtaggtatggttaattgacatagcgagctatcctttgattgcaaaagctgagaatgttcatccccgttggagcaagatctttcccaacttttgctgggttggctttgcctgcttgcaaataaatggtcataattcgttttattgatttttccattgccgttcacgctttgagtatgatggttggtgttacgttaaggtcaaggctgttttcaactcaacaaatagccttgacctacacaaaaaccgagctattttccgatatcgcctttttgcgccgcccccacctcttttgtcagcgtacccaaggcggtagtaggttccaagcggtcccttcctaaggcgtgcccctgactatcacgccatctgctaatgtatttattcctgaatggaagacgtagtctcttccctgattgttatcccattgtccacgcccattattaaaagctgccctgagctggcttccctcttctgcttcaattgttatttttgcgtagccttcatactccgacgaatttagcggcacccctggcaaagtggtccaagcttcttggttgagagagtaatgaatgtgtggattggtccaactagtcttatagtaaatcgtaatgtcatttgcttggacaggtttttcggaatgccattccccatcaaaccacccgtcttggtctcgataaaacccctcctctccaggccctggccattgattagcgccagcatctttaaataacacgcgcgcactttctgccccttcgattgtgtacttataccagccattctcgacaagctccatttctggcgctgaaccccatgatggttcctccactttaggctctgtttcgtaatagtaaatgtgcggtgtcccccatgtgtcagggtttttgaagtaagcggttagccctggcgattttataaacgtatacatttcttcagtagagccgaattcgttctccgccttgagctgaagcgttacctcttctccggcttccgtcccttccccaatcgtaatggcatcgccatccataaaggattgttcggcagctccattaaccgagtatgccccttctcctacgttttgcacgtgaagcgtcacctctaacgaatcaccggaaaaggaaccgccaggcggatcagcaaaaacgtggggataaggcggtaccttcgtaaaggtatattccgcttccgcttcacctgcttcattttttgcaaaaagccgcaatgtcagcgactcatcaatagccaagtcactcccgatggtcagcacctccccatcggcaaagggtgttcccttttccttcggatcagaaccgtcgattgtatatgcgcccgactccgcttgcagcacactgagtgtgacttcaagttcttcactagaaaactccccgccttgaggcgaagcagatacggaaggaatcgtctctccttcggtttccactaaaatgacgccattttgatgggctgcaaatgtcgctttcccgttttcaacgaccgtgctgtctcccgtataaaagtcacggactgtctgcccgtcggaaaaaacagaggaaacatcaatcgtcgtttcacccgttgccccgactgtcacgacaacacgatcatcgaccccatcctccacgtaggtgcggctaaatgtatacggatttgtgccaatttgcttgtgcgctcctgcccctatcgctaaatggttatttcgaaattgccccatcttttgccaatggcttaatacatcctcatgcacagaatcccagttcatcgatgaacgtgtgccttgctggggatcagatccagtcggcccaaatggccgtgctgtctcatcgccataaaacaatttgaccccgccaggaaggagcattaaatacgtgccgccatcaactaggcgctcccgtggatataagtgcgtatcatgctgagaaagatagcttagcacattgaaagacgcgtccatattgatctgatttgcatagtgggaaaaagtgtcttccattgtgtccaatcggtaagcgggaccgttcccatgttccccttggaatgtaaaattaatgattgaatcgaatccgtaatcaaagtattcgcttcgtccgacaccatggccccacacttcgcctaccatccaaaagtcatccgtccagctcgcccctggtgcatctgggttttcttcacgccatgaccacagcgcttcattcgctgcatcctttaactgctgccaacggaacaactccacatgtttggccgtgtcgatacgaaagccatcaattccaaattcctcgacccaagcggcgagccattgcacaatataatctgccggagctatgtctagatcacggcgtaggtcgctcgcagttggaacgatccagtcctcatacccctctcgtcgctcttggctccacttcgtctctaacaagggaggcaagccgacactatgtgtgagctccgtccggaagtcgggcaaaccggctaagcacattgtggtttcactgtttccacacgattcatatccgccaattcctgcgcgaacccaaggtccccaccatgtgctccacgccgaagcatcatcataatgaatatggttgtggacatcgtgccaagtttgcccttcacctggtgtccaatcctcggatacgcctggatttccgaagccatattcattcatatctttaatggtgttgtagcctggatggttcatcaccacatctaagacgacgcgaattccttgttcgtgggctgtgttgacgaactctcgcatttcctcgactgtccccatattttgatcgaccgtcgtataatccaacgcataatagccatggtatgcataatgagcaaaatcgccatctgagccgccgccgacccagccatggatctgttcataaggagccgaaatccaaatcgtattgatccctagatctgtgaaatacccttcattgagcttatcggttaacccttggagatccccaccatgaaacgttccgatgttttggccccaagcgtctttttgtggccggccatatgaatcgttattgcctcgattaccgtcgttaaagcggtcagtaatagcaaaataaaccgttgcattatcccatgaaaatggtttctggtcgctgttttgcgaagcatatgcgtcattcacagaggaagtagataacaaaaatgaaaacgttaccataactatacatgctaaaaaaacttttgttttccttatattaatcaagatttttcctctcctttgccatttttaagcaaacgtttgcacaaacagacaaaaaacaagtggagcccaccttcagaaaacgctttcaaatcgaaaaccaaccagccactcaatatcctttaaataagcaagattgagccagtatggatagagaacattgctttttcttcccactcctcctttcattttctattcattctaaattgatttttcttaaaaatcaatagatctctctatttttcttttgtgtggatacagttgctctagattttattgaaggcacgctcatttttattttaatccgtctaacagttcgctcgcttctccaccactcagctttcctcatagaacaaagtgcttgacttctcaaacccgagtaaatatattaggtttatcagataattgactgacgcatcaatcagtaataaaaaggggatgtttatgagcacacttgataacaggcgccatttaatggaggctgccttggcgcttttcgcccaagaaggctaccacaaaacgaaagtatccgacattgtcaaacaagtcggcgttgcccaaggcactttctattggcactttaaaaacaaagaggagattgttttatgcattttgcaagaaggcgaacaagcactcttgaatgtcattcgctctggataccgccaaacagaaggaaatgtcgatgatatggttgaatcttcgcggcgattaatgaccgacctcttctcttttgcgcaagcaaatccagattatatgcggttgttgttcaaaacagggcaagatgcagaagaaaaaatttgccggcatatctcccatacgctcatcgctattgaagaagcgttcgaacgtaacattaaacgggcccaagaactagagatgttgccaaaagatagttccagcaaaagacttgctgctatgctcgttagtttagtgctcggaacacttgagcgttggctgttttcggaatcaccccatttagacaatattgcagctgaatcgttggcagttgaaatcgtttcttttgaattttttgggctactcggcaaaacaaagtgagtggaggtgaccttttttgggatttttgaaaaaagtcgtcgtgcaagtcataccgagcttgctcattttaacattgatcatttttttccttgtttatgttgctggtgatcctgtgtccgtgatgcttcctgaaaatgcgactgcggcagaccgtgaagtgttacgtgaagccttaggtttaaatgaaccttttcacgtgcaatatttgcattttttaagtgaccttctccgtggcgattttgggatgtccctgcaataccagcagccagccattgaccttgtgttcagccgtttgtgggcaacgttagctctgtcgattgtagcgatgctaatcgcgattgcgatttccatccccctaggcatttatgctgccattaagcggaatacgtttgttgatgtactcatttcaggattgtcgattgtcggcaaggcgatgcctaatttttggattgggattatgctgattctctttctagctgtcgccattcccatctttcccgtttcaggcgcagcgacaccgcttcattttgtattgccagcctttacgcttggcatcgccctagcggcggaaatgacgcggctcacacgggctagtattttggaagtaatcgaccaagaatatgtccaaacagcgagaagcaaaggtcaaaaagagagcattgtcatttttaaacatgtgtttttaaatgcgttaattcccgttataacgatcatcggtctacaatttccacagttgattggcggtgccattgttgtcgaaaccgttttttcatggccaggggttggccgcttgttgctttcctcaatgggagtaagcgatatggcagtcattcaagccattgtatttgtcattgcgctcattacgattgttgtaaatttattgaccgatttgctttatcgcgtgcttgacccacgcattaaatacaactaggctaggagaatcgttcatggaggctacttctaaacaaaagaaagcgaatcaggctcgtttttttgcccacctctctcctttaggcttggcagggttggtcactgttttcctaatcgccgtacttgctatctttgcaccgtggattgttcctcacgatccttttcaaattgatgcgacacaacgcctaatcccgccagcatggatggaaaatggctccagcttgcattggctcggcaccgaccatctagggagagatgtgctcagccgtcttatttacggaggacgtgtttccctttttgtcggcatcgtctctgttgtgattgctggtttcattggtctgacacttggccttgcctctggctatttaggcggttggctcgatgcactcatcatgcgctttgttgacgctatgcttgccattccaacgttgttgcttgtccttgtagcaatggtaatgcttgaaccgtcgattgccacactcattttgatcattggactgacaagttgggttcagtatactcgcgttgtccgtggggaagtgcttagtgtaaaggaaagggagtttgtccagtctgccaacacgcttggagcaagcaacacttatattgttcgaaaacatattttgccaaacgttttgtcttcttttattgtgatcgcgaccattgggatcggcacagccattttaacagagtcctctcttagttttcttggctttggcgtccaaccccctgacatcacttggggaggaatgctaaacgacgggcgcaactatttagccacaagctggtgggttgcgacatttcctggtatagcgattacagtcaccgttctttcttttacctttctaggagattggttacgggacttattagacccacgcttcatacgaggaggcataaaggatgacaaatagccctttgcttcgtgtaaaagaccttgtcgcaacatttgcttctggcagcgacttcaaaccagttgtcaatggcctttcctttcatgtttatccgggtgaaattgtagccattgtcggcgaatcaggtagcggtaaaagtgtgacctctctttcaattatggggctgttaaatcgaaacgccacgatcagcggatcgatcctttatgaaggacaagagttactgactatgtcggcaactgaacgcagacggttacgtggcaaagaaatgtcgatgattttccaagagccgatgtcctctttaaatccaatgctgcgcattcagacgcaaattgccgaagtgcttaaaatccataaccgtagctggagtaaatcagcgattgctaaaaaagtcattgatttgcttgaacaagtggacattccaaaccctgaagaaacagcaaaacgctttccacaccaattgtctggaggcatgaggcaacgggtgatgattgccatcgccatcgcctgtcaaccaaaattgttaattgcagatgaaccgacaacagcactcgatgtcacgacgcaagcacaaatcttagcgcttatgaaacggttaaacaaacaaaacggcactggaatcgtatttataactcatgatttaagtgtcgtcgctgatatcgctgaccgagttcttgtaatgcgcaccggcaaaattgtcgaagaagcgacggtgtttgatttatttgacaaaccgcaacacccttatacacttggcctgttaaaggcaatgccgacattagacacaagtttttagtccttagcccattcttggcaatcccccaagcttggccaatggattgtcagtatccaggaaaggaggaaacaaaaaatggaaccgacgagtgaatcgcttcttgatgtacgccatctaagcaaaacatttccattgaaaaagagcaaaacaaacaaagcatcttcctttaaagcagtagatgacgtcagtttccaagtttttaaaggagaaacattggggattgtcggcgagtcaggcagtggaaaatcaacggtggcaaaaatgattttgcagctcttggaaccaactagcggggaaatttattttttagggcaaaaccttgccaaccagtcaaaagcggaaagcaaagcgactaaaaggcgtatgcaggcagtgttccaagacccctatgcgtcgttaaacccgagaatgagagctaaggaaattgtcacagaaccgctcattctccataagcaattaaacaagaaaaaacgggacgacaaggcgctagaattgttgcatgaggttggtttaagcgaacagcatttaaatcggttcccacacgaatttagcggtgggcagcgccaacggttaagcattgccagagcgatcgccttaaaaccagatctcatcatatgtgatgaggctgtctctgcccttgacgtctcgatccaagcgcaaattttaaaattgctcaagtccctgcaaacatcatatgggctctcttatatttttattgcccatggattgccgactgtgaaacagcttagcaaccgtgtcgcgattatgcataaaggcaagattgtcgagatcggagaaacaaacgacattttccagtcgccgaaacacacttatacaaaatcactgttaaaagccgtgccgccctctcatcctagagacaggcacaaaccatctattggaggataaatcatgaaaaaacctgtttcttttataaccatttctgctgtttcactggcgctccttgcttcctgcggttttgaagatcctgatgcaaacgatacaaccaatgacgatacagcgtctggcaatggccagctgacgattgctaaccctgccgacatcactacgtttgaccctcataataatagcgtcattacgacttcggctgtactcgtaaatgtatacagtaagttgttaaaacgggatgaagcaggagaaatcattcctgagttggcggagagttgggacacgatagatgatgtaacttgggaattccaattacgtgatgatgttacttttcataacggcgatccatttaccgcggaagatgtgaaattctcattggaacgagttgccaacgatacgacgctccagcaatatgccacatttagccaaattgaaaacgtggacgtagtggatgaccataccattcaaattacaactgctgaacctgacccacaattgctcagtcgcctctctactccagcagcaagcatgttgccgaaagactattttgaagaagtaggcgctgatgagtttttcaaagccccggttggaacaggaccatttcaatttgaatcttggcaacaagatgaggctgttgtattaagcaaatatgaaggctattttgaaggtgagccaaattgggaaactgttcgctttagcgtggtgcctgaagactcaacccgtgtatctgaacttcttaccggcggcgtcgatatcgccttcaatattcctaccgctgacatggaacggattgacaacaatgatggcacccatatggcattagaaccgattcaacgtgttatccaaatttggctgtctaatgaggaaggagaaactacagctgacccggcagtaagagaagcgattgatttggctatcgacaatcaggtgatcatcgatgaaattcttcaaggcagcgctacagccacacggactcatatcacgcccggaaactttggcgctgatccatctttgtatgacacgtacgagtacgatccagaacgagcaaaagaaattcttgctgatgctggctatgaagatggcgtaacaatcaatatgtctgttaataattactatacggaaatggcggaagtggttggcggcatgctagccgatgtcggcattacagccaatatcgaactaattgaacaaagccagtttgccaaccgattatttaacggtgaattagaagaagcgatctttgtcggctggggaaatgacatgtttgatgcaagcgtgctcgatttctttaaagaagaaggggtcgccccttataccaaccctgaaattgaacagctgcttgaagatgctgcctataatatggatgaggaagaacgtgccgaccaatatcaacaagttcaacaacaattagctgaagatcgcggcgctgtttatttattccaacttcaaggccgctacggggtgagtgaccgtttggattacaaaccaagacttgatgagctctattacgcaaacgaaatcaaattggccgaataaggcataaggagaataaactcatggaccttccagctttatcgcaatgggaagcttttatggtggaaacgttgcttgccaaaggcatggagcgacaaacactcattaacttgctgaaagcaaaagatgcggaaacactgaacaactttgatgacaccttcgattatcatgaactgattacagctgcagaaacagctttcgacaaccttacgcaagcagtgcaagtaggctacaccattaagtttgtgtcgaaattcggaattaaacgcttgcttggtttaaaatatggactggaggaaggcatcgactaccaaatggcagacgaccggtttgacaatcttacgcttacagcggcacaattagctgaatttaaagcaatgttgtcgccaaactggaaagtgtttaacgaaattaatggaaatgggacttttaccgtctccattctccatgcaacccttgtacacaacacctaaccttatcaaaatgaagccctaagcttttttgcttagggcttcagactgtagacaaacgctcgcatacttcgtcgtttgcctcactcatatgctcatgaacccccgttctattcgcatcttccctcggctgcactcctcgtctgacaagcgttttctatcagtctgagggcggttatcgactttgtcgacaacctcatgccctaagcttttttgcttagggcttcattttacgtggttgttgtcttattcatgttttttcaattttcgtttagccaagtaagaaaggccaaagcaacaaccggcaaatacaatagcagctccaataatgcctgaatatatttgtacacttgcatcatgtatttggtaaggctcaggcagccaaaaaccaattgtcaaaaataaacccgcccctaaaaacaacaagcagaacaactgataatcatgctgatcctgtttcaaacgttgaatcgtcttttcgtccattagactgcctcctctcctactgctctccttttctatcttaacagatcaaaagaagttcgaaaggcgaagacttttgctaatagaggaaaattatgctgataaatggtcgagcatcaacatcacttgtttagcagaattgacagctgatttttctaaaaatgtatcgtatgacatctttgcgtcttggccagccacgtcagataatgcccggataatgacaaatggagtctggaattggtggcatacttgagcgatcgcgccagcttccatttctgcacaataagcagcaggaaatagcgttttgacttcatttacacgcgtttcttcccccataaaggaatcacctgtcacaatcagcccctcttctgaatggaaacctactttttgcgcggctgtcttcgccgctgcgattaaggttgcatctggcaaatacgctggcaccattcctggaacttgtccatattcatagccaaacacagttgcgtcaacatcgtggtaacgcacctccgttgaaatgacaagatcgccaacagccatacttgcgttaagaccacctgctacgccagtgttgataatggcatcaggttgaaaccgatcatttaatagcgttgttgccagtgcagcgttcacttttccaattccacatcgtgttaagactacttgcacagcgccaatttggccttctgtaaattcacaattggcaatcgttgtcgctacacggttttccattttatctcgtaaaaagttaacttcttcttccattgcgccaatgataccgattttcacagccactcttcccttctattggacaatttcttttccagtatacacacctttaaggaagatttcacgacttaaaactgaaaaaaccagctggcaatgccggctggttttctttgtcttgattgacaaagcgttttcgatccgtctggttatgcgtttttcttcgttgctgtttttcgttttgatgcagctgcttttttccgtttcggctttgtccgctctaatgacgcctctagcgctgacattaaatcggtcacattcgtgtcccgttcggcttcttttggttccgaaacaaccattttgtttccttgctttttttgttcaattagatcaaaaagctgctcccggtattcatccgtgtatgactctgggtcaaattcactggtaagctggtcaattaaaagcaacgccgtctttagttctttttcttctactttaggcgcttctggcaaattagggacatcagcaagcttccgcacctcatcaggaaaataaatcgtctccatcattaaggcgttgccgtacgtacggacaattgccaaatgttctttcgcgcgaatgataattttgccaatgccaatttttttagaatcagcaagcgccctttgcaacaatgcgtaggctttggagccaccatcccctggcgctaaaaaataagaacggtcaaaataaatcgggtcgacttcctccaattggacaaaatcaagaatttgcaccgctttgtcttcgttgtcttttcgaaactgctcaagttcttctgcttcaataacaacaaatttgtttttcgcgtattcgtatgctttgacaatatcgtctgcctctactgcttcctcgcagtggcgacaccttttctcataagagattggcgtatggcactttttatggagctgacgcattttgatgtctttgttttcggttgccgtgtgcagcttaacaggaatatgaacaagcccgaactggatgctgcctttccaaactgtatgcatgatttcacctcactcttactatacggcgcaaacgccattaatatcacaggaaaggtttggttactctatagctaggaggtagcgcaaatgaaaccaatgaaactgacggagacgaccgcatttcctcagtcaacaggctgggttgcagagcctaaatacgatggctatcgttgccttgtctccattacagacacgagcattgagctaataagccgtaacgggcgattgctaaaccacgctttccctgaagttgtaagtgcttttgaagaaaggcgaacaaaactttcaaacgagttgccgctcgtattagatggagagcttgtttgtttgctgaatggctacgcaagtcattttcctgccgtccaaacccgttcgcgcatgagcaatgttcatgtaatcgaaaaggaaatggtaagcaggccttgccaatggatagcctttgacatactgaaccaacctaatgttccttatcgagaaaggcgcaaacagttgttatcattctgcaaacgtgccgacattcccctcactccattaggcggtgtcccgacacttggtgtggttgagtcgacaagcgctattcaagcgctccttacgaccgttaaacgttataatggcgaagggattgtccttaaaaaacagctaagcccctacaatcaaaatattcgttcaaaagattggctaaaactgaaacattaccggcttgtacctgttcttgttacattttttgatgccacgaatggctattttcacggcagcgtttatcaccaacaaggggcgttaaatgaagtcgctatttttaagcacggccttttgccagacgatgccaaaacgttagccaatttttttagaacaaaaggaacggctgaaaaaaatgggtttcgcctcgctccatcaatcgtcgttgagctcgcttgcattggcctttctggtggacaactccgtgaagtctcctttgtccgctttttgcatcatgctgatccaaacgacatcaccatgaccacgctgtttcatggtctgtacccattgccagatattgtagagacgacaagtttggataaaccgttatgggaacaggtcacaaaagcggattaccttcattatttgcaagctgttatgccttttatgctgccttttttatatcaacgagcgcttactgttattcggtttccccatgggacgtttgcaaatgagcgtttttaccagaaacatattccaaattatgcgcctgcttatgtcaactcagcttggttagaagacatttgttatattttgtgcaacaatccagaaacgcttatatggctcggaaaccaactggcgttggaactccatattccgtttcaaacgattgaatcaagcaaaccagatgaaattgtctttgatctcgatccacctagccaagatcagtttggccttgcccaggaagcagcactggacatgaaacaaattttcaatcgatttcaactcccctttttttgcaaaacgactggaggaaaaggcctgcaagtacacattccattggaaaaacagacccttacttatgaggaaacaggccgcttcatgaaatttgtcgcagattttctctgccaacaaaagccaggcaagtatacgacggaacgactcaaaaaaaagcgacggaaccgtctctatatcgactacgttcagcatgcttataacaaaacggtcattgccccatactccatgagagagaccggctttgccgccgttcctttgcgagaagacgaattagcatcgccaaccctttcgcctcagcaattttcatacgttgatgtgcttaggcgcatccaacaatttgagaacccgtttattggctacgaacgagaacgagtaagcaaagaacgctttatccaattgctcgatgagattggcatatagcaaaaaacggatgcagcatgcatccgtttcagactcatttattcggtctacgcgaattgttaaagtagacgctagcgagggtctgtagctgattcgctcgacgagacaaccgtccaaccaacattgtcttcccattgaaggtgtacatcgtaataggtgcctgtgttgttatcaagcaacacgcctcgggcacttgtagtcgagccgccatttcctaaccacataagtgttgaattcgattcgtttaaacctgtggccaaataaagggctgactccatttcgttccagttttgactacctcttgtaaagtcattcggtgacggattttcctgttgcgtaggaacagtatcgccttctgtttcttccgtttcttcgtcttctgtttgttcttcttcgtcgttttcctcactgctattttcgtcttcattattttcttcttcggaagcatcgttgtcgctgtcgccgtcatcattggctgctgtacttccttcttcatcgccttcttcaatcgtttggccatctccagattgacctgagctgctttcttgttcatccacagcagcttgatcggaactaaaccaatttactgcaagattgccaccaagaaagaggatcagcacagtaacaatgataatagcaatgtttaggattcgattaatacgtttacttctgcgatattcagatcgccgtcccatcaaataacctcctctttccaacgttctttttccattatagcttgtttcagttgaacttcaaccttccttttgtcggagattgacgaaaaatcatgtgaaaaaaaagagtcctcttgttacaagtgcaacaagagaacttcttatatctagcggatttcaaggatttcgacttccatttccccgcctggcgtattcacaactacacggtcattaactgttttacctaacaaactttgcgccatcggagagtcatttgaaattttcccctcaaaaggatctgactccgctgaaccgacaatcgtatattcttcttcttccccatcaggcagttccattaagcgaactgtttttcctaatgaaacaacattgccatctactttttcattttcaatcatgacggcattgcgaatcattttttccagctgggcaatccggccttcaacaaatgcctggtcttctttggcagaatcatactcggagttctccgacaggtcgccaaagctacgtgcgacttttatacgttcaacgacttctttacgtcgtgttgtaatcaaataatgtagttcttcttcaagttttttcttgccttctgcggtcatgtaatgttttttctcttctgccatgctattcactcctcattaatatatacaaaaggacggttgggactggctttttttaagcatccaacttcttttgttcaataattgtgcgaatttttgttgccattaaatcgatcgcgactttgttttgcccgccttctgggataattaaatcggcataacgttttgtcggctccacaaactgcaaatgcatgggcctcacgaccgaagtatattggtcaatgactgaatcaattgaccgcccgcgctcctttgtatcgcgaacaagcctacgaatgatgcggatatcaggatccgtgtcgacaaacacctttatatccatcatgcttcgtaaacgttcgtcttcaagaatcaaaattccttctaggataatgacatctttcggctcaatttttgtaacctcttttgcccgtgtatgattggcataatcgtaggaaggcttaaaaatcggcgaccgatcggccagttgcataagatgggcataaagaagctcattgtcaaatgaaagcggatggtcataattcgtttttaaacgctcttcaaatgtgagatgatcttgatttttataatatgcatcttgttcaatcaagacaatggatgactggctgaactgcttaaatatttctttggcgaccgttgtcttcccagatccagtgccgcctgctacgccaatgatcacaggcctcgtgcttgattccattcgtcttcctctcctatgttgctgttaagttcgtatcttcatgctgcacgccattccatcgccaatcggcaaaatgcgcgtcgtaaaatcgggatggttggacaaccattcattgtagcgtttgattttgatcgcgagcttctgcaaacgttttggttgcgaagacaagtcttcttttgcgacaaggcctcgaaacaaaatattgtcactgatcacaagccccgaatctgctaacttcggcgtatacaattcaaaaaaagtttggtattgcccttttgcagcatcaataaataatacatcaaatggagtggaatgtacaacgagatcaactccattggtcgcatccccatggataaggtgaattcggtcttgcaagccagcacgctgtatgtaagcttgtgcttgatggaagcgaacatcatcccgttcgattgtcgtaatctgcgtttgcggaagcgcttccgccattcgaatagccgaatagccgattgctgttccaatttctaagatggtttttggttgtttggcgacaagcagcaaaagcatagcttccagtgccacgagttccataatcggcacgttgttgtcctttgcatactgctccatttccagcacaagcggcgaacgttttggtagcagcgacgttacataatcatgtatttcttcgttcatcatgtgtaggccattcctttgcaatgaaaaaagcaagggaggctaggctccccgccctactcattattttctgcttcttcccattcatgacggtaggcatcacgtgcttctagatgcttgttgtaatcttcattgtagatgatttcaccgttgtaacgggcatagaaatacaggtaatcagtgtcattcgggtcagcagcagctacaagtgattgttcccggactgtagcaatcggtccaggcggcaacccttcatatcgatacgtattatacggtgaatcgatgtcaaggtcatcataggttgtcatataaatatgctcgccttgggcgtatgcaacggttgggtcgacttgcagcttcatattttgctctaatcggttatgaaggacgccagaaatttcaaagcggtctggtgcctcttttgcttcccgttcaataatggatccaatcgtcagcagctcatggaaggtgtactcgctgttttcaatcaagtcggtattgttttgataaatttgttccatttggtcaagcatcgcttcaatgaccgtttttacaggaggctgttcctcttcaaatggataactggcgggaaacaagtagccttccagagggtgatgaatctcttcgtttaaaatttcatctgtcagcatgtcatagtcgtcgataagctctttgacatattcttcatcatctataacagccattacttcttcttgggatgttccagtaaactcggcaagtctttcgcttaagcttgctaagttaaggccctcaggaatagtaatcgtcgaggcagcctccgccacgactcggccatcttttaaacttgcaataagctcatccacgcccattgatgtgtttaatgtatacgttcctgcttggaaatccgattcatttttataacgggcgtaataacggaaaaacgttgcattgcggattaatccttcttcttctagaatgtccgcaattccgcttgtcgaagttccgacaggaatcgttacttctatatcggtgcctttcccttcttcgtccattggttttaaagcggttgttaagtaaaaataactaaatatgccggcggccaagatcacggcaaacagaattaaaacacaaataaacacgatcttacggacggttttggcttgggatgcacgttcctgataaagctctgaatgctgtttcggttgctttgtcatttattgcctccttacccgtcccattatactacaaaaaatgctaaagtcatcctttatcgccttcatttttacagcattcgccctttattctaaagcaaacccgtgccacattcagcacgggtttgtggttttactcttcctcttcagagaaagtattaagcatctcttcgatcatgtcccattcttcgtccgtctcaacgggataaaacgaaatatcattgtcttcgttttgctgttcttcataacggaacgcaaacacttcgacttcctcttcgtcatcctcttcttccccgactggaacgagtaccatatacgacttttctgtttcgtcaactgtaaaacggaacaattcatcaaatagatgttctgtgccattctcatctggaatgacaaaacgctctttttcttcttgagccattttctttccctcgctttgctaaatggtttgttctatgtcagtgtgtggctttggcggtctaaatatccttgtaaaatgaatacagcagccattttgtctacagcttttttgcgtttttttcgacttacatctgcatcaattaaaacgcgctgagctgcagctgttgtaagacgttcatcccataaaacggtctgcacattgcactgttgttcaagtgttcgcgcgaatgtctcactccgtgtggcgctttccccaaccgtgccgttcatgtttttaggataaccaatcaccactttttggacgtcattctctttgatcagctgagctagtgcttcaaaatcacggtttgggtcgtcttcagatcgttggatcgtcggcagtccttgcgctgtccacccgaacgcatcactaatggcgacaccaattgtttttgtccctacgtctaagccgattgttttcatttgttttccttgccatgggaccgcaaatacgacttcacaagcgtttcaattagctcgtctcgttctaatttgcggattagcgtgcgggcatctttatgcctaggaatgtaggctggatcaccagacaacagatagccgacgatttggttaatcgggttgtaccctttttcttcaagcgcatcataaacagacaagagcacttcttggacatctgcgtcaaaggaatcatcattaaaattgaattgcatcgtattatccattgaactcaactagctctcacctcttttagcgttctttagacgaaatgcgcgtcgttctgtcgtctgtcctattgtacaacagaatcgaccatttaggaaattgatttcacgtattcatgcacataggcaagggcttcgtccaacttggcaggatcttttccaccagcttgcgccatatcaggccggcccccgccccccccgcctgtacgagcggcaacttctttaattaatttgccggcatggaagccttccgcaatagccggctttgtaacgccagcgacaaaggcaagcttgttgcctgtttttgctgcaaggacaattactgctttttcgtgtgcttgtttaagcgtatccaccatagaacggagcgcttccgtgtcttttgcatcaacttgggctgcaataacggcaacaccgccaatttccttgacttggtcatttaaatttccagcttcagcttgcccaagcttagcggttaacgattcgttctccctttgagctttccgcaactcttcttgcaagctttcaattcgctgcggcacgtcagataatcgctttgcttttaaacgttccgccgcatcttttaaaatcgctgtttgctctgacaaaaactgataggcgccttttgacgtcactgcttcaatacggcgcacacctgccccaataccggattcgcttgtaattttaaacaatccgatttcagctgtgttgcgtacatggcaaccaccacacaattcaaggctgtaatcgccaacacggacaactcggacttcgctgccgtatttctccccaaacaatgccattgcgccggccgcttttgcttcttctaaacgttgaatcgaaatgtcaactggcaacgcctgccacactttttcgttaacaatttcttcaatttgttgaagctcattcggcgtcacttgcccaaaatgggaaaagtcaaagcgcaaccgttcactcgacacaagcgaccctgcttgattgacatgttcgcctaaaacgtcttttaacgcttggtggagcaaatgggtagctgtatgatttttaacaatatcgagtcgttcccttacttctatacgggcgcttgcttgttggccagtggagatttcgccaattgtcacttcagccgtgtgcagatgttggccatttggcgcttttttcacatctttaactacagcttgtcctgtgtcggttacaatcatccctctatctgccacttgcccgccgctctcagcataaaaaggcgtttcatcaagaaagaattggatgacatccccttggacggcttgctcgactttctctttgccgcggacgagcgtcgtaatgactgcatctgtctccgtatgttcatagccgacaaacacacttggcgttttcacttcgccaaagacatcttcctgaacggacatcgatgcgctttcctggcgagccgcccgcgctctctgccgctgttgttccatttcctggtcaaagccagcacggtcaactgtcaatccttcatcatggacatactcttccgttaaatcaattggaaagccatacgtgtcataaaggcgaaatgcgtcctcacctgcaatggtttccttgttggtggcctttgctttttcgatgatgtcgcttaaaatcgcaaggccttcgttcaatgtttcatggaaacgctcttcttcggtgcgaatgacccgtgcaataaagtcttgcttatctgcaacttcaggataaaagtctttcatgatcgcaccaacaacgggcacgagctcatacataaacgggcggtcaatgccaattgattttgcaaagcggaccgcgcggcgcaacaagcggcgcaacacataaccgcgaccttcattagacggcaacgccccgtcgccaactgcaaaagcaaccgttcgaatatggtcggcaatcactttaaaagcagtatctgcttccttgtatgttgtactagccagtgcttccgttgcctcaatgattggcataaacaaatctgtctcaaagttggtcggcgtgtcttggatcacagataccatccgctccagacccatgcctgtatcaatgtttttctttggcaatggcgtgtatgtaccatctgcgttatggttgaactgggaaaaaaccaaattccaaatctcaaggtagcgttcattttcaccacctggatacaactctgggtcattcgggtcatcgccatactcaggtccccggtcatagaaaatttctgagtttggaccacttgggccttcgccaatgtcccagaagttcccttctaagcggataatccgttcttcaggaagaccaatatgttgatgccaatagcggtaagcctcttcatcttcaggatgaacggtcacagaaaggcgttcttgcggaaacccgatccattttttatcggtcaaaaattcccacgcccattcaatcgcttgctctttaaaataatcgccgattgaaaaattgccaagcatctcaaaaaatgtatggtgtcgcgccgtttttccgacgttttcgatgtcgttcgtacgaatcgacttttgcgcgttgacaatacgcgggttttcggggatcacccgtccgtcaaaatacttttttaatgtggcaacgccactgttaatccatagcaatgacggatcttcaaaaggcacaagggaagcacttggctctacagaatggcctttctctttaaaaaagtcaatgaacatttggcgaacacttgccgaacttaaccgttgcaatatgaatcactccttatgtatttatcagcacataaaaaaactcctccctagaaagaagggacgagatgtctgttcacgcggtaccaccctcattatggcgcgattgtagcgccaccactttcatacctttaacgcaggaaaatacggtgggttttgcccacagctccagaatagcgttccgcatctcttcgccagcgcttttttcagccaagaaagcgcttctctttagacgggctgacacgtactcgttctatcaacgcaataaccgttttccggtatatctttttcagcacgattatagcgttcaaggatacaaatgtcaatcgtgctggatatcgcctttaatggactgacgaatatggacgaccgtcacctttaaaatcgccgcaactgggacggcaatgagcaaaccaacaatgccaccagcttccacgccaattaacagtgcaataatgatgatcattggatgcaaatgaaccgtccggccgacaatgaccggcgatagcagattcccttcaatttgctgaataatgactaatgcaatcactgtataaagaccgagcgtcgttgattcaagaagagcagcaccgactgctggaatcgcgccaataatcgcgccgaaataagggataaaatcggtcgcaccaacaaaaaaaccgagcacaattggataaggaacgccaagaatccacagagcaacagtcgaaagcacgccaacacaaaaagcgactagcagctgaccacgaacataggaaccaaatgtccgatcaacatcgtttgcataggctgtcaacccttttcgccattttcttggcgttaagtaaaaagcaacccgtttaaggagctcgtagtcttttaaaaggtaaaacactaaaaaaggaacgacgatccatgtcatgaaggactgtaacatccggataatcacttgttcgatctggtcaagccccgcttttgcgaacgattcaattttcacactccattcgccgacatggtcgtcaagtgggtttggtaagttttccgccgtacgttgtaagttcaacagtgactttttcacttcagccaattgccctggcagtacatccatggcttcttttacctgtgccgcaagtgcgggcaatccccaaaaaagcatagcggcaattgcaagaataaatgctaaaaacaacataaacgtggcaagtgctcgcggcaatccgagacgaacaaaccactcaacaatggggtgaagcaaataggccgatacaaaagcaacacaaagcggtccgagcaatgtcgccaaaatgtcccacactggccgtaaaaataacactacttggcctaccagcaacaacaatagcacgatcagtaaatatttcgtccatttcaacacgtctgtttgcagccgttcccgcttcatgactcccactccttttgcctctcctccctagcttgcgcaaaacagtggcttcgtaatcaaaaaaagcggccctattgcggccgctttttcttgtctaggcaaacatgcgtttgaatctttttctcgcttttttccaagtacgggcattcatcaggttagcttgcattactggctctataaattgccggattctccgctttgttttccggtcatttaatgaataccatgcagcgccaacgccgatggccattaatggagcgattgacttccgcaaaaggctcacctccgcttagcttacatgtttagacgacgttcttccgtttcaaacaaatcgtcaagtgagctgagcgaaccgtcctcctctacttggtgaaggagcaacgtgtctttcactaaactcatctcaatgaaacaattccaacaatagtattggtttgtgccaatctttccgatgtcttttcggtggcagttagggcaacgcatagagggcctcctttacagagacagaatggcccgttctttactgattactaaatgttggcctttaacgactttccggccttcctttatatcagacagccagccatctgtcacttcataccctatgatcgtgcccaattcgacgttgaaatatacatcttctaccaatccgagcgtttccccttcctcggaaagaagcggcttccctttgaaacggcgtcgccctgtgtgaatagggtggagcattttttgctcgcggttgaacggctttaaagcctgttcaccagcgatcataaccgcttcctgaccagcgtgagcaatttcaccaatcggcaaaaaagcatgctgtgcaaacaaatgtgttcgtttcaccgttaagccaacgacttctttgccatcaaacagagcatccacgacccggccatgttcatggccagttgtattgctgataacaggaagccctataagcgcttgaactgttcgcaaagaaacaccgcctttccgaacagtcttaagttatgcatatgtagcttcctctatccccggtgaacgttaccagtacgtgaaagcaatagttgaaggcgctcctttaatttggaatggcggtgctcgtctgcatgtttaatcgcctgttccatcgtttttcgatcgccacataagagcaaatactgcttggcccgggtaatgcctgtataaagcaagttccgcctcagcatgcgcatgtagctcgacacgactggcatcaccacaatcggaaattcgcttccttgtgctttatggatagaacagcaataggcatgggttagctgtgaaaagtcttttttctcataggtgacttccagtccgtcaaaggaaaccactagctgatcttttttttccgtcgtctctttagcgtagaaaacagcaacaatttctcctctatcgccgttgtatacgccttcctctggattgttgactaactggaggaccatatcgcctttgcgaaaaacaacatccccaaacggcagctctctgcgaccttcttttgccggattaaatagggactgaagcatcgtgtttaattcattgatccctgcctgcccgcggtacatgggtgccagtacttggatctccttagcactgtagcctttcttcatggcgttttcacaaatttgccaaacggcttgttgcacttggttcggctggcaaggaaaaaagacgcggtctgcctttttcgttaaaaaatcacttggaagcacgccatctttcatcgagtgggcaagctcaatgatggaagagccttcagcttgcctgtaaatgtcctttaattggattgttggaataacgtctgcttctaaaaggtcttttaatacttggccaggccctacagaaggcaactggttttcatcccctactaacacgacttgcatgcctttgggaatcgctttaaataactgatttgcaacccaggcatcgaccatcgacatctcatcgacaattagcagttccccttcaagctgttcatggtcgcctttttcaaagccggtcgcactgcctttccagccgagcaagctgtgtatcgtgcttgcaggcagttccgttgcttcagccatccgtttgctggctcgaccagtgggcgcagtcaacttaagggggaaagatttgtttttgtaagcagccacttcaagagaaagcccatgaagcgcagcataagcttccacaattcctttaatgaccgtagtctttcctgttccaggccctcctgtcagcaacaacagcggagaacgaagagcagtggcaatcgcttctttttgcgtgtttgaatacgtaacagcatgtgtatcctcaatgtgcccgagtgttttttcaatgtctgcttcagtgaattcttgtgtcagttcttggcttaaaattcggcggatgttggtggcaatgcctttttctgcataatacaatgacttcatgtagatgcggtcttcttcacgaacgagcatgccctcttcattcatttcgatgaggatggcctcaagctcggaagcgtcaatttgtacgtttgggctcgataataatgcagtcccctccgtaatgagcgcttcctcctgcaagtataaatgtccttgttgcatacaacattcccggagcaaataaagcagccccgcccgcaaacgctctggatggttcccagttaagccaatcgccgcccctaattggtctgcacggcgaaagccgactccttctacatcctgaatgagcaaatacgggttggtgcggataacatcaagtgcttgcaatttgtacgttcggtaaacactcatcgacaactctgtgccaaacccgtattgggacagttggataatgacttgctccgcgccttgttgctcaagaagttggttatagagcatcgtcgctgtatcttcttttagcttcgggatgttgtttaataccgttcgatcttcaataatagctgaaatggccctttcaccgagagcgtcgacaattgcttccgctgtctttttgccaacgccagggaaacggtcgcttgacaaaaaccgaataattccgcttttcgtctgtggcaaatcgcgcctaaacgtttccactttgtattggaggccaaagcgtggatgttcagcgacttgcccgaaaaataaataggtctcctctacttccagttcaggcaaatggccgacaaccgttattttgcgcccttctatttgttcattcgtcttttcaatccgcgtcatcgccactgtataatcgttttcttcattgcgaaacaacacatgaacgacttttcctttaacaaaacctttctccagcgttttttccccaacattatccatagcttcaccctttttcaagtgtcgcttcaataagccgtttgccgttgccagcgagaagatggcccggttggtgggcaagcgcttggttaaaagaggcaagtgctgcttcagcttcatcagacgctgcctggacaacccctaaattgtaataagcatcagcatgactaggatcaagggcaattgttttttcaaacaaaggacgggcttcgtccagcagctccagctgggctaagcacagcccatattgaaaaacaatttcgctgtcttcactacttaattcatatgctcggcttaggttagcctgtgcatgagcaagcttcccttcgctgtaatagctcatgcctagcatgtaaaacaagtctgcctcattcatgccaccagtaagcgcttcagtaaacgcttgaatcgcttgctggtggttttcttgctgataatggacacagcctatcccgtaataggcaacagtcgcatcgtggtcgagctccagtgctcgctcataaaaaacgagcgcacgctcaaagtcattgagagctgctagcaagttccccatgttgatataccctgtcggttcttttggattttcttcaatgtaggcagcaaactgttttgccgcttcttcatagttcccttttcgcatgagctcaattcccgcttgattatccatcgtccttccccctccgaaagctaaaaaggaaaacgcggtttacgcattttcccggtgaattttgtcaattacgccgccaccaatgcaacgatctccttcatacaacacaaccgcttgtcctggcgtaatcgcgcgttgtggctggtcaaactgaataaacgcacggccatcttccttcggaaatacagtaacgccttggtcttcttgacgatatcgaaattttgctttgcatgtaaatgggctcgttctttcttccttggcaatccagttcatgtcagtagcccagagcccatctgagtatagtcctggatgatgatagccttgaccgacaatcagtacatttcgttccaagtctttgtcaatgacaaaccacggctccccagcgccaccaatgccaagcccttggcgctggccaagcgtatagtacataagcccatcgtgctgccctttatcaatgccgtccattgtttccatccgtcctggttgtgctgggagaaaggtttgcaggaattctttaaaatctcgttcaccaataaaacaaatgccagtgctgtcttttttcgttgctgttgcaagctctgcctcagcagcaatttttcgtacttccgctttttgcaaatggccaagagggaacatcacttttgacagttgtttttggctaagtgcatttaaaaaatacgtctggtctttattagcatctgccccttttattaacctatattccccgtccaattcctgcaattgggcataatggcccgtcgcgacatagtcagcaccgagggaaatcgcatggtttaagaatgctttaaacttaatttctttgttgcacataacgtcaggatttggcgttcgtcccgctttatattcttctagaaaatacgtaaacactttatcccagtattgtttctcaaaattaactgcgtagtatggaatgcctagctgttgcgctactcgctcaacgtcctcataatcttctgtggccgaacaaaagcctgaatcattgctatcatcccagtttttcataaaaatcccaatgacatcatagccttgttctttcaaaagcaaagctgttacagaagaatctacacctccagacatgccgacaacgacacgtgtatcttctcgttttttcatattggttccccactttctattgctcgccactattcaatgaacgcctttttcccttgctcagacaagacgcaatccgcgatttgctcaaacgcataagccaactcttcctttgaattggtcatgccaaaactaaagcggatcgcttctttgacacgatggctatcttttccatacatcgcttgaatgacatgagaaggttgaagcgtccctgccgtgcaagcagaacctccagacgcagcaatgccttgcaagtctaatttcatcaaaagcgcttctgtagacgcacctggaaaacaaacgttcaaaatgtgatcaagccgttccccactctcgccattttccagcactgctacaccgcgccgctccatcgtttcaaaaaacattgtcctgtataatttgtagctttggcgacgctgctcacgttcagcgtatgcttggttgaaagcatgagcaaaaccaacagcaccggcgacattttctgtgcctgccctgcgtttccgttcttgctcgcccccatgcaacagcggttctaattcgatgccttcacgtacaaacaaacagccaatcccttttggcccatttagcttatggcttgcaatggtcatcaagtctacggcgagctcgtccgtattgagctcatatagcccagctgcttgaacagcatcggaatgaaaagctgcttgatgcccttttagcagctcgccaatttctttaatcggttgcactgtgccaacctcattgttcgcaaacatgatggagacaaggatcgtttcttcggttaacgcatttttcaattgcgcaaacgaaatttgcccattttcattgacaggcagctttgttatcgaaaacccttcctttgccaattcctccagcgtatgcaggacagcatgatgttcaatttctgaagtgatgatatgcgtgcctttttcacggttggcacgggcaaagccaataagcgctaaattattcgcctctgtaccgccgctcgtaaacagcacctcattgctgttagcgtttagcaatgacgcaattgattcacgggcttcgattaacgcttgtttcgcttggcgtccaaactgatggatgcttgatggattaccaaaaaccgtagaaaaataaggcatcatcgcttccaacgcttggggatgcaacactgatgtggctgcatggtctaaataaatttgcttcatgagtggcaccttccgtccccttgctccgttttgttaaatataaaacatatagtactcttgttctccatcttccttaaaattggctaagtcggcaagagtcgttttatcgagcacttccttgactgcgtcccgtatttttatccataaatcgcgcttggcaggctcctcatcttcaagcacttcaaccggactaatcggtccttctaacacacgaataatatcgcctgctgtaatatcttcggcatctttagccagcatatagccaccataggcaccgcgaacacttttaacgagcatcgcattgcggagcggcgcaatcaattgctccaaataatgctctgatagtttatattccttagcaatagatttcaaggaaacaggcccttcccctgatttcttagcgagtgccatcataatcgtcaatccataacgtccttttgtcgaaattttcacgtcaatccctctttcatcaaaataaatgctgtatgatctggaaaatactccgtctttcacttcatgtatgtgacaatccgttctcgtgatccgcttttcaatgttgcctattcctacttggcaagcgctaaattttcctttatacccttgacattatagcatgttttcatactggattgatagaagttcgcagaatcgagaaggcacgggcatttcgttcatggacagttctgcttgtctgagctacactacgtaagacgaggaaaaagaggagggacactcatgaaaagacaaccgttggcctatcgcatgcgccctacttctgtcgaagaagtgattggccagcattctttgcttgggaaaggcatgatgttatcgagaatgattaaagcgaaccagctttcttccatggtgctttatggtccgccaggtacagggaaaacgtcgattgcccgagcgattgcagggtcgagcggcatgcatttccgcatgttgaacgccactgtccatcataaaaaagatatggagacggctgtcgaggaagccaagatgtatggctcgctccttttaatattagatgaagtccatcgacttgataaagcaaagcaagactttctgctcccccatttagagagcggtctattgcttttaattggcgctactactgccaatccttaccattcaatcaacccagcgattcgtagccgctgccatatttttgaattggaacagctcgaacctgatgatattgaaaaagcgctgcgccgtgccctcgcagacgaagagagaggccttggccatgaaaaaatcgatatcgcccctgaagcactccgccatttggcattggcttgtggcggcgatgtccgcgctgcccttaatgcgcttgagcttgctgtcctctccacacctaaacagccagatggcacacgctctgtcacactccgttccgccgaacagagtatccagaaaaaaagcattcaacatgacaaagatggcgatgcccattatgatgtgctgtctgcttttcaaaagtcgatccgcggaagcgacgtgaacgcgagtcttcactacttggcacgcttgttagaagcaggcgaccttattagcatccatcgccgtctgctcgttatcgcctatgaggacattagccttgccaatcctcaagcggggcctcgaacgcttgcagccattgaagcatcagaaaggctcggactgcctgaagcacggattcctcttgccaacgctgtggttgaacttgccctttctccaaaaagcaacagtgcctataaagcacttgatgccgctattgatgcactgcgaaaaggtggcagtggtgaagtgcctcgccatttaaaagatgcgcattataaaggagcgcaacaattaggcagaggcagcgactataaataccctcatgactataaagatggctgggtcaaacaacagtatttgccagacaaaattgccgatcaccgttattatgagccaaagcaaacagggaaattcgaacaagcgcttagcgaaatgtacaaaagacgaagctaaacatgtttcatcctttttttctgccaacatcgattgcctagttacgatgacgtgattgtccattctcgcaaacaagatcttttttagcaggctagtataaaatggcgcaactctggcaaaagtaaagccataagcactgcatgaaggagatggacaaatgaaaacgagacaagatgcatggtcccatgaagatgatgtgcttcttgctgagactgttttaacgcatattaaagaaggaagtacacagctaaaggcatttgacgaggttggggatgctttaaaccggacctctgcagcgtgtggatttagatggaatgctgttgtacggcaaaaatatttaaagcaaatcgattccgccaaacgggaacgaaaagaacggaaacgagcgctttcagccagttatttctctcaagctcgtattggaaaaacagaaagcccgtctagaacgttttaccaaacagcaacaggggatggtggagcggtgacgcttgaatctattattggccaactcaaacaattggcacaaaccgagcccgcgtcctcacgcttagaattagagaacaaacagttgcgcgctcaattggaagaaaagactgctaaattaaacgagctagaaacaaagctacaacgaaataaacaagaacatagtatgattgaagaagattaccagtcgttgatttcgattatgaacagggcgcgccgccttgcaattttggaagaagacgaacaggatcatcctgcttttcggatggacgctaacggaaacttagagaaactatcaaagtaaattcgcttcttgtttaaaggatgaaagctcctacgttttttagcgtaggagcttactagttaagaacgtcggttaatctctatgccttctagtaaacaagtgatgacatgtcccgccatgatcaagcctgatacagacggcacgaacgcatttgaagacggcggtagtttcgctttgcggatgtttccttgttcagccgtttcaggtacaatttccttacggatgtcttccctaatttggatcggtttctcatctgaaaaaacaacattgacgcctttatgaatcccctcttttcgtaacctcgtacgaattacttttgcaatagggtcatagcttgtttcggaaatatccgcaatccttaaacgagttgggtccattttattggcgactcccatgctggatataatcggaatgccccgcagcttacattgtttaatcaaatggattttataagaaatggtgtcgctggcatcaatgacgaagtcaagtttatgtgaaaaaaacgattcatacgtttcctcggtataaaacatttttcttgtaattacttcacaatttgggttgatgtcacttattcgcgcagccatcaaatcaactttcggcttgccaactgttgagagcaatgcatggatctggcgatttacattcgtaatatcgacatcgtctttatcaacgagcacaattttaccgacgccagaacgggctagcgcttctgccgaaaaggatccgactcctcctacccctaacacagcaactgtactgccttttaggcgctccagcccatcatggccgattgctaactcatttcttgaaaactggtgcaacatcgatgtccactccttttgtgcctttgtactgactgaatgatcataccacaaaatgaacgcaatccgcctgctcgtatgtgatttttttctcgcattaagagaaaaagcgaaaaaccgataccggaagagattaacgattgcacaaatttctaaatgcgcctaaatcatttcttaactacaagccggtttctaattaaactgcctaaaatctaaattttccttgcatttttttaaaagatatactagagtattaacnnnnnnnnnnnnnnnnnnnnnnnnnnnnnnnnnnnnnnnnnnnnnnnnnnnnnnnnnnnnnnnnnnnnnnnnnnnnnnnnnnnnnnnnnnnnnnnnnnnnagatatactagagtattaaccattaaccctttacaaaaataaatatgttttttcttatccagagagatggagggatttggccctttgaagtctcagcaaccggcctttggcaatggtgctaattccaataggtagtgtacctaggagataagaagttcgttgtcgatagtacgaggaccttctttattctagaaggtcctttattatttggccggtacaactgagtggagaagtggcaagcatcactttgggtaaccattttttaatcaaaaggagagaaatgaggatgacaagcattgctgtaaaaccaccatttagggcagaccacgttggcagtttactgcggccagaacgtatccaccaagcgagatatgactgtaaggaaggcaccattacggccgcgcaattgcatgaaatagagacacaagaaatcaaacgaattgtcgataagcaaattgaaattggcttggagttggtgacggacggggaatttaggcgccgtttctggcatactgatttcctcgaacatttgaacggcgtagaagggtatgttccagaagtcggctatattttccaaggcaatgaagaaacggaaaggtacaacgtccgcaacgtaggaaaagtttcatttaaccatgatcatccccatgtaaaagactttattgaatttaataagattgtcggagggcgtgcagtcgcgaaacaaaccattccgagcccaaatcaattgtttaatattggcattcgtgatgaaacgatctaccctgatattgaggaatacgcaaaagatattattcaagcctaccgtgatgccgtgaacgctttctacgaggcaggttgtcgttatttgcaatttgatgacgtctatattgctggcctttcgtcgcctgacattccatttaatgatggagcatactcaagagaatatttaattgatttagcactccgtgtcgtaaatggcgttttggaagaaaaaccagacgatctcgtggtgacgactcacctttgccgtggcaactaccggtctaactgggcttttgaaggcagttatgcccttattgctccgactttatttgcaaaagaaaaagtgaatggtttctttttagaatacgatgacgatcgttctggagactttaaaccactggagcatattccgaacggcggggcccgcgttgttcttggactcctcacctctaaaaatggggaattagaagataaagaatcaatcattggccgcattaatgaagcaagccaatatgtaccgctagaacaactctgtttaagccctcaatgtggctttgcttccactcatcatggaaatcttttaaccgaggaacaacagtgggcaaaattaaaatatatcgttgatattgccaaagaagtttggggataaggacgcgtttcaatcaagcacgatcggaatttctctctttttcacgcttcccctgttttttacttggacatcgttccgtttaaaaccaattcagaaagtatacatcttataaaagcccggcataggccgggctttcagactgtagacaaacgctcgcatacttcgtcgtttgtctcggtcatatgctcatgaacccccgttctattcgcatcttccctcgcctgcactcctcgtctgacaagcgttttctatcagtctgatgattttgtcgactttgtcgacaacctcaaagcccggcataggccgggctttagtatgtctcgtttatctctgtcatatgtctttcatccacaagagaaccgttaatcagcaagtctgagaggggactcccttttcggctatcgtctttatatagcttgagcatatagtcacgaacttggcctccattttgccggtagccaactttgaatttttctagagaagccgtgatattccctataagctcaagaccgaccttctctggaatacactagccaatcatccttgagattttgatttctttcgccgttagaaagccaaaccaaaaaagcacccacaagggtgcttcatcgtcacaattatcccgactatgccgtaagaacttggtgctttgaacctgcaaggcaggtgggtgcttcgcattggcctttttacgtccccagcttgcggggcatgtaagcgagccaataacggcaagctcccttttttaaggtgttggctcaaagtaaacaattcctacgaacatctcaggataatgtttgtatagccattatactctttttttaaacgcttctcaagtattcacggaaaattaaaacgtttttcctacggctttttcagtgattgtgagattcgagaattgtttttagatgtgctatggtaattgtacattgtctttttgcttgcccttctttactgggcaacgtttacgcagtttaaccaaaggagggatcgtccatgtcaaagctggcaacgcaccgctgtattgaagttcgccaggaaattggattactcaaaaagcagattgtcgaaacgtcgtttgatttagcactttatcctgaccggattgaaacagaaaacgcttcgttccctattggttctgttttcgacatttcctaccggctgccgagtggagaaagccagcttggttttctttatttgcatacaagccaaggcgttgttacctataaaattaagcaaaatcccgaatcctttattaaagcgttcaaaaaacttgtccctgaaacaaaattccgttcataaagcatgtgcctgttcctgtttaaatacatgctccccaccgattacttgatacgactgataaggaacttccaaaagtggcgccgtcactaaaaggacatcgccttctttttcgcggcggcgctgccacacatgaatattgctggaaacgtcactgacatctgccccagtaggtacaaaccaaagctgcttttgcagttgaggcatattcgatgcaggctgggaaaggacggtcctacgcagacgcttgcctttctcatgtagaataaagtcttcgacagcgctattggctgttgcctcttgccctgctcctgggccagcaaaaaacagttgcttaatgtctttgccttgtaacagaacgccattggccacaccgtttacgcccgctaatagatgtgtttcctctacaaaagcaggcttcacagtaccagttatgctgccgtcttgttgtaaaaaagaggtgccaacaagttttaaggcaaactggttttcttttgccacccgtacatgccatggttcaatcccgccaattccttggcgttcaaatgccgatatgtcgacccattgaccaaaacaaaggcgcgccagcaaagtcaacttatacagggcgtcatagccttctacatcggacgtcgggtctgtttctgcatagccaagccgctgcgcttcatctagagcttgttgataggttttgccactgtccatttcagtgagaataaaattggttgtgccgtttaaaatgcctgatatcccattaatcgcagttgtcgccaatgcactttgcaacacattcacaatcgggatcgctccacaaaccgcagcgtcgtagccgtaataggcaccagatgaaagggcgaccgcctctagttctttaccgtgtaaggcgacaagctttttattggcggtcactacagatacgccttctgctagcaagctttccgtatacgttctggccggttcgacaacatttgttacttcaaacacaacatcatatgtagcagcctcccggaaaagatcccatgatgacgtaacgagtttggccccttcgctttgcctttgcttagactgatcttttactaaaatggagacaagttcaatccgatcacttaccatctgttggagcgctctttgtgtactggtgatgcgctcgtaaatgccagtccctactgtcccaaatccaataatgcctattttcaccgtcttcaccctttctccattgaaaaaaccccttttcagataagaaaaggggttcgcctcacttatctttcagaacaaaagctgctctgctgaatgtagcaccgtggtttacaaataaactggttgccgggcttcattgggtcaggtccctccgccactcttgataagttcttattcatttttatattaggcacattataagcagaggccacgtatttgtcaactgcgcttgctaataatggacaagtttaaatcaatcagctgttcaacgctcactttgtttggcgcttcggttagaaggtcgctagcgcttgccgtttttggaaaagcaatcacctcacgtaaattgcttttgcgtgcaagaagcatgacgattcggtccagacctaaggcaatgccgccatgtggaggcgttccataatcaaatgcttcaagcaaaaagccaaactcttctttagccgcttctgaactaaaaccaaggagcttgaacattttttcttgcagttcccgttcatagatgcgctgggaaccgccgccaagctcaaagccgtttaagacaaggtcatatgcttcggcacgtacttgctctggatgggtttccatcaggtccaagtcttccgctttcgggcgtgtaaacggatgatggagcgcgacaaaccgttttgcttgttcgtcatattcgacaagtggaaaatcagttacccagaggaaatgaaacgcgttttcgtcaattagctgaaactcctttccaaactttaagcgcagcgcgcccaatgcatgaaacacaacttgctttttatcggctccgaaaaagagcaaatcgcctgcttcagcgtccattgccgcaagcaatgcagccgtttgcgcctcattaaagaatttggcaatcgggccctttatcccttcgtcatcgactttgagccaagccaacccttttgccccataaggcttgacaaaatcagctagcgcatcaatgtcttttcgtgaaagcttatcagccccgcctttcagtgtaaggcctttaataatgccgcctgcttctaacgcgcctttaaacactttaaactccgtgtctttgagcacgtcagacagttcgatcagttccatgccaaaacgagtgtcaggcttgtcagaaccgtagcggttcatcgcttcctcgtacgtcatccgcgggaaaggccgttttagctcaagcccgtgtgtttctttcagcaatttttccatcatggcttcagtcatcgccaagatatcctctgtatcaagaaagcttgtttcaatatcgatttgcgtaaattcaggctgcctgtctgcgcgcaaatcttcatcacggaaacagcggacaatttggaagtacttctcaaaaccggacaccatcaacagttgcttaaaaatttgcggtgattgtggcagcgcataaaactggccatgatggacgcggctcggcaccaaataatcacgcgctccttctggcgtgctttttgttagcattggcgtctcaatctccaaatagccatctgcatcaagaaaatcgcgaacgcttttcatgattttgtgacgcatcgcgaacgcttcttgcatatcagggcgacgcaaatccaaatagcggtatttcaagcggacgtcttcagctgcatccgtgtctgcttcaatttggaatggcaaagatttcgagacattcaggatttcgagctcacgaacgtgaacttcgatagcaccagttgctagcttgtcattaacggcctgttcattccgttccaccacaatgcctgaaacggcgacaagatactcattgcggacacggtcagctgctttcaacgcttcttcactgacttccggactgcacacaacttggacaataccagagcgatcacgaagatctaaaaaaatcacctggcctaaatcacggcgccgctgcacccacccttttagttgaacctgttggcctgcgagtgttttgtcaagttggccacaatgatgtgtacgtttcatctcctagtttcctcctcgtatctgttcttgtaaaaatgatgtcaaatcgctaatggcgactaccgtttgttctccagttgccatttgtttaacgagcgcttgttgcttcgcgatttcgtcttcgccaatgataattgtataagacgcttgataacgatcagccgctttaagctgtgctttcatttttttgcctaagtagtctttatcagcacgaatgcctccatcgcgcaaccgttgcaacagttgtggccctaggcggcttgcttcatcgccgagagtaactacatacgcatcaaggctttgcggtactggcaagtcgacattctccgctttcatcgctaatataaagcgttcgatgctgaaggcaaatccgatgcctggcgtctctggcccgccaaattcctggacaagtccattgtagcgcccgcccccgcatagcgttgtaattgctccgaatcctggagcagtactaagcaattcaaatgcggtatggttgtaataatccaacccacgcacaagcgttggatcgactacataaggaatgttcagcaagtcgagcgtttcctttagcgactgaaaatacgcacgtgactcttcatttaaataatctaaaatcgacggtgctgtcgccataagcggatgctctctatcctttttgcaatcgagaatacgtaatggatttttttcaagtcgcatttggcaatcgctacaaaattcatcaattgatggcttaaagtgggcaattaatgcttcccgatgtgcctgacggctttccgaatcgccaagtgaattgatgaccagtttcaagttgacaaggccaagttttttgcagatggcgatgagcaatgctagcacttccgcatctagttgggggctagcgctgccaagcgcctctacgccaaattggacaaactgacgcatacgccctgcttgtgggcgctcataacgaaacattgggcctgtgtagtacaacttcgttggctgtgctggggatgcatacagtttatggttgacataagaacgaacgactgctgccgttccctcaggccttagtgttaagctgcgaccgccgcggtccgaaaaggtatacatttctttttgaacaatatcggtcgtatcgcctacaccccgtgaaaaaatttcggtatgttcaaagatcggcgtacggatttcttgataatggtatgtttcgcatgtttccttagcaacttgttcaatgtactgccaaattgctgcgtcatctggcaaaatatcttgcgtcccccgtggcagctgaatcgacatctctcatctctccttttccataaaaaaactcccgtcccagatgatcggatcatctgggacgggagcatatcccgtggtaccacccaaattgaggcataaagcccccacttttgtctgttaacgccagctacgccctttcctactaaaccagtggttgttcagaaagaatcctcaaaggtgttcattcgttacggtagaagaggccgctttcagcctaggcggccctctctttgcatctattgcccttaactactatgccttatcattggttttattccatttttcagttgtgatggtaacaaaacggcaggcgtttgatgccgccttttttgtgcgcttatatgcttcaacaataactctaagatgtttataactatacgaattacacagaccggtgtcaaccgttaattgcgattttgctgttttttatacatcggtaaggaatgttgctcgatacctgtttccaacggtttcactagatcccagactcctattggggtaggaatctctttttcccattgcgtgtaaaacggcactggatagttgctactagtccgcatgtaaccgccccttttcccaacgtttttgttaggatagccattccaaggccgttttaaacgtattttcaaaaaaagaggcattgatagattaagtcatggagcgcggggcgaatacggcgaatcgcatgattgtctcttcctaaatggacacggttcgttaaaaaaatgaccgcaagttcagcaacagggtcaaaccatatgcttgtgcctgtaaaaccaagatggccataggaaaacggggaaaaaaagcggccgcaagacgagttggtctgtgctccttttatgatccagccgagtccccggggttcttccataccagcgctaaaatgttgccgtgcatagcggagaatgtctgggtcaaatagcaaagggtttgctgtttgcatttcaccagcaaatttttcaatgtcactcactgtcgaaaaaagccctgcatggccactgacgccccccatggcaaaagcattctcatcatggacttcaccgcatttagggcgccctaaccaatgatcccattccgttgctgcgtaacgagtagcaggaaatcggggacaaaactgtgtttcctgcatgccaagaggagtgtatatccattcgtttgcaacccgttgcaaactctttccggttacttgttcgatgattgctccaagggcaataaaacttaaatcgctgtaaacgacgcgggttccaggtgtgtacgtaggcgcttggtggcaaacacgggcgatcgtttcgtgataattaagcccctccttataaaagggaacgctggcaggaagccctgctgaatgggtcagcaactgaaaaatggttacattttctttcccattagcgccgaaaggagggagcacctctgctacgggcatatggagggaaaggcgcttcctttgccataactgtaaaatgagcggcaacgtgcaaacaacttttgttaaagaagctaaatcaaaaaccgtattgatgctcatcggttgcctgtctggccatagctggcgataaccgatcgcgccccggaaaagcaggcggtttcgatgaatcacactaataacagccccaggaagccgttctttgtcgatttgctcttgcaaaaaagtgaacatggtgctgcctagctccaccgtttctccccctttttgctttagattaccacaaaaagaggcatctccgtaaagcaaaagaagtctccttcccttcatccaaggatgaaaggaggagacttcagaaagttggggccggttttggatcaaccggaatggccctcgcgattgagcgaagcttacttactctgtttataaatttgttcgatgatgcttgaaacgaggcgggcctcattcggtttcacgatcagttctgttccactcgtgcaggcagcgacaaaatgccgtgcttgtgctagcccttcatcgctttctccggaaatccagtccgccacggtagtcgtcatcattccttgagaagcatggttgacagcataaggaaacacgtttacgccaccttgggtgccagagatgcttaacgtttctttgtcttcaggaacattggcagcccatgacgtttcaaatagcatcgtcgcgccgtttttaaatttaatataagcagtggcgtggtcttcgacatcaatggtcgttgcatcgtacaatccccattgattgacttggtcaggatcgcggctgaccatttcgtacgtttggccgtgaacactttctatttctgggaaatcaaggagccaaagtgctaaatctaacaaatggcaaccgtaatccattagacaccctccgccttgaagggatttattggtgaacacgccccatccagggacttttctccgccgcatcgcttcgacacgcacaactagagggtcgccgattcctccagaggcaattaggcgtttggcggcttgcgattcctttttaaaacggtaatggtaaccgacttgcaatacacgcttcgctttctcggctgcgttgaccatgtcctcacacgctgcatccgtaatggccatcggtttttcacaaaatacgtggacaccagcttcaagtgcggcaacggacatctcatggtgaaacttgttaggcgtacaaataataacggcatcgacacgtttgaacagttccgctgcctcttttgcgacaaaaggaatcgcaaactggtcggcaacttctttcgctctgttctcattaacatcataaacgccagcaagttcgactccctcgatttttgaatatgcagggatatgcctgcctgatgcaatgccgccgacgccaataaaccctagttttaattgtatcatttgcttccccctggaacaggctcaagaggcttggcgtttccgtaagcaggatatgcccgtttcgtcggtgctgcccagcgaacggcattttgaatgacccgttggacatgttgatttttaaaggtaggatacgtttcatgccctggacgaaaataaaagattttgccgtttcctctcgtgtatgtacagccgctacggaacacttcgccgccctggaaccagctaagaaaaacgatctcatctggattcggaatatcaaagtgctcgccatacatttcttccttctctagttcaaaatattcatcaatgccttctgcaattggatggcttgggctcacaacccaaaggcgctctttttcatccgcctcacgccattttaaatcgcaccctgtccccatcaatttcttgaatattttcgagaaatggcctgaatgaaggacaatcaagcccattccctcaagcacccttttatgaacgcgttcgactacttcatccgctacttcgtggtgagcaatatgcccccaccaaacaaggacatcggtttggtttaacagttcttctgtcaaaccatgttcaggctcgtctagtgttgccgttgaaacttgatgttctttgcctaaaaaatcagcaatgacttggtgaatcccgtctggataaacgctgcgcacagcttcatctttttgttcatgcctaaattcattccaaatggttacattcattgtatttccccttcctggaatcgttcccagtaatcgttaagttgatttccgcgccaacagcggcgcctccaaatatgtcgctaacggtggtggactctcttttcgcaacaaagcgagcatacgttccattgctgccctgcccatttcctgcacaggctggtgaatcgtcgtcaactcgggttcaatcaaagtagcatgcggttgattgtcaaagccgacaatcgctaagtcatcagggattttccagccagcagcttttgcctcagcgattattccagctgccacttcatcgcttcctgtcaaaatggcatcaggccggttagctaagcacaccatttgtttgaatatatttctgccgtcctcaagggaatgtcccaaaaacaaacattcgccatacatgtgcatcctggcttcttccattgcctggcaaaaccctaaataacgatcttgggcaagtggcgaaataacggcatcggattccgtttttgtgatcggattgcaataagcaatttgcttataacctttttttaacaaatggacagttgcttcgtacatcgctttactctggtcaattgtcactactggtactccatcagactgccgtggatattcattgcaaatgacaatgggcccataatccgtatagggggcaatcgtttcccaatcattaacgagcgaagcaagaataaggccatcgacttgtttggttcgcaaaagctgcaagaaatggagctcttggtttgcagaacctcttgtgttgcataaaataagcctatacgactgttcagcagcgacctcgtccatcgcgtctacaattgcactaaaaaaagggtttacgattcgtgaaacaaggacagcaattgtccgtgtttctgttcccctaaggcgttgagccgatgaattcggtaaatagcccagctccttcattgcttgtttgacggctttccgtttttcctcatccacataaggctgattgttcattacacgggaaaccgttgaccgtgacacaccagcacgaagggccacatctttaattgtgggcattgatccactcctttattgaaaacgttctcatttcacttttattgtacttgtttctcccttcatgtcaaccttcatttataaaaaagagcctgccaactggcaagctccggactatcgttgcaaacgctcgtatacattttcgtttgtgcaagtatcggctcgttaacactcgtcttattcggatcccccttaaatgaagatgtcaacacgattaagacgacaagcgcttactcgctttcaactaaaatcgttaccggcccatcattaattaactctacttccatcatcgccccaaactcgcccgtttccacaacaaggccgagctctcgcaaatagctgttaaaacgttcataaagcagctttgccttttcaggcttagcagcacgcatgaaattaggacgacgtccttttttacagtctccataaagcgtaaattgtgaaatcgataagacggaaccgccttgatcgagtaccgattcattcattttggcagagctgtcttcaaaaatgcgcaaatgggctactttttccgcacaaaaacgtacgtccgcttctgtatcttcttgatgaattccaactaagaggacaaggcctggcccaatgtcgcctactgttttttggtcgactcgaacactgccccgtttcgctcgctggactagtactcgcactttttctcacctgcctcgactctaatgggttaccctccgcacagagtaaatgtcttttaactgtttaattttgtcgaccactttttgcaaatgagcgatattggaaatagaaatgctcatttcaatcgtcgccattttatgcttatggtcagaacgcccagaaatcgtatttatttgcgtgcgcgtttctgtcaatgtgtgcaacacttcatttaacagaccgttgcggtcaaatccagtaatttcaatgtcgacattatacgacttgccctgctgctcatttccttcccattccacttcaagcaaacgggacgaatctgaatcggctatgacattcgggcaatcttcacggtgaatggaaacgccacggcctttcgtaatgtagccgacaatctcatctcctggcactggcgtgcaacatcgtgctaggcggataagcatattgtcgaccccttttacatgcacgccaattgaatttgtccgcttgtttggcgaaaccgtttggatttcatttaacactgcatcaagggattgttgctcctgctcgctgtcttttgctttgcgttgtttttcagtaaggcgattgacaatttgtttagcgctaattccgccataaccaactgctgcatacatatcttcttcgccagcaaaactgaacttgctaatcgcttcttgtaaattttcctgcgttaaaatgtcttttacatcgaaatcaagcgcccgtatttctttttcgattgcttctttccctttgacgacattttcttcgcgtttctcttttttgaaccactgtttgattttgtttttagcatgtgacgacttagtaattttcaaccagtcatggcttggcccatatgagtgtttcgacgtcatcacttcgacaatgtcacccgtttttagttcatggtcaagggggaccattttgctgttcactttcgcaccgatacaacggttgccgatctcactatggatccgataagcaaaatcaagaggaaccgatccccggggcaattcaatgacgtctccttttggtgtaaacacaaacaccatatcagaaaacaggtccattttcatagattccataaactcttgggcgtcatttgtgtctgtctgcgattcaatcacatcgcggaaccacgttaatttatcttcaaacgaatagcgattgcttgagagtgttttcccttctttatacgcccaatgggcggcaacaccatattcagctacccggtgcatgtcctctgtacggatctgcacttccagcgggtctccgttcggtccgactacggttgtatgcagcgactgatacatatttgcttttggcatggcaatgtaatctttaaagcgtcctggcatggggcgccagcacgtatgaatgacgccaagaaccgcataacagtctttaatgtttttaacaataattcggacagctagcaaatcataaatttcattaaattgtttgtgctgaatcaccattttgcggtaaatgctgtatatatgctttggccggcctgacaattctgcctgtacgttcacttctttaagttggactttgattttgtccatcacttctgtcaaatactcttcccgttcagcacgtttccgtttcattaaattgacaatacggtaatactgctgtggatccaaataacgaagcgctgtatcttccagttcccatttaatcgttgaaattccaagacgatgtgccaatggagcaaagatctctaacgtttcgtttgaagtaatccgctgcttctgcggtggcataaatttaagtgtccgcatattatggagacggtctgccagtttaatcaagaggacgcggatatctttcgccatagccataagcattttccggtggttttcggcttgctgctcctcttttgatttatatttaaacttctttaattttgttacgccgtcaactagcatagcgacttcctcgttaaacgcttcttccaaatcgtcgactgttgcttcggtatcttcaacgacatcatgaagaaaagcggcggcaatcgtattcggatctaattcaagcccgacaataatgccagctacttggactgggtgtaaaatatagggctctcccgatttacggtactgaccactgtgtgccttttcagcaaactcgtacgctttttccaaaaagacaatatcatcttttgtcaaatacgcacgcgctttttcgagcacctgatcaattgtcatgaaatcacctttactcattcgacaagttttctttctattatccgctactcgttcagtgttgtaaagggagagcggcttagaaattgcaaaaagaccggtgtgccgattcgcacaaccagtctgtaagcgatttattcgtaagacattaatgaaaacaagtcgtactgctttagtttatcgcggccgcctatataagccaattcgatcaagaaggcaatcccgaccactttcccgccaagttgctctaccattttagccgttgcctcaatcgtaccccctgttgcgaggaggtcatcggtaatgacgacgcgttggcctggctggatgctgtctttatggatggttaaacagtcttttccatattcaagaccatagttggcttcaatgacttcccgaggcaatttgccttttttcctgacagggacaaaaccgatttcaagttcagtcgcgattgggcaaccaacaacaaagccacgtgcttcagggccaacaatgacgtctgcttgtttttcttttgcataaacggcaagttcttccacagcgcgcttgtaggctgtgccgttttgcatcagcgtcgtaatgtctttaaagcgtatgccctcttgcggccaatcttcgacaattgttatatattgtttataatccatttaggatcgactcctcttttgtttcagcgctcccatcgatggcagcctggaaccattcttttaactgttgataagaagcaaaaacaaattcattctcaagccatgctttttcctgcttggcttggtaggtcggcgatgcagtcaacgcttttttttcagggttttctactgcttcaacgatgccgtcgtcaagcttgataaaaccaagttctaaaaatacagtggtcataaattcgaccgtgcgggctgaccagcctttgtgcttttcgagcttcgcgccgagttgattcagtgaaaagcgttggtttttcttaataaaaccataataccatttgaactgctcgcggtttggattcgtttgaaaaaacgattcttcttcctcagagaacacaacataaacacggcttggctcccctttcttagaaaacagagtttccagttcaacccggttgctaggcaaatcgagcaacacgacgtaagctttaaaaaaggaaggcgcttgccggtaatcatatacgggtacgtccaacccaagtctttcttttgtcccttcttgaaaggaaatagcgacgagtttttcacgaggcaagtcaagcaaccggctgtttaaacggtttggctggatgctgcgccaatcaaatagttgccactccaatacggcaagatcgtcaataataagttgtggctttacttttccgttccattcattcaacgataccgttccgatggcagataactttgcatgtggcgtgatctcttcaaacaaatgccccattctaaaggcaattccgtcaagcggcttttgggcgccagtaaattggatttttaaatggttttggttgctgccaatccggcgcatatcggaaatatgcgcaccctcaacaagtacaatcggtttacggttggcaacgccaaacggggcaagtgcctgcaactcgccaatcacttgaacggttacatcctccacttctgcaacgaggtctatatccgtggctggcgtaagcatgtcgtccgttagtgtctccttggcttgcttgattaaacgagaacgtaagtcgtcaatgtcctcggttttaagtgtcatccctgccgccatcgggtgtccgccaaaatgaggaagtatatcccggttattcgccaattcttggtacatgtcaaacccttcgatgcttctggccgagcctttcgcaagtcctgaagattcgtcaatgctcatgacaattgtcggacggtaaaactgctctacaaggcgagaagcgacaatcccgatgacccctggattccagccttccttcgctacaacgatggcatgggggatctttgtgccataggttgtttccacaaggcgaatcgcttcttctgtcattttgctaacaattgcttgccgttctttattgaggctatcgatttctgtggctagcgcttttgcttcttcttcatcatcagcaaggagcagctcaacggctggattagcagaatcgagccgccctgctgcatttagacgagggccaatcgcaaagccgatatggtcggcatccattgcttcctgcttcatgccgcatacttcctttaaggcacggatcccagggcggccgcttgattcaatcgcgcgaagcccctttttggccagcagccgattttcatcaatgagaggcaccaagtcggcgatcgtgccgatcacagcgtaatcgagcagctcttcaggcaggcgcccgagcaaagcgtgtgcaactttaaaggcaacgcctacgccagcaagctctttaaatggatacggacaaccaggctgcttaggattaatgatcgccaatgcttctggcaaaaccggcggcggctcatggtggtcagtgataataaaatccaggccgatgtctttggcatgggcagcttcattcaaagcagaaatgcctgtatcgactgttatcactaagtgataaccttgcctttttgcaaagtctagcgctgggcaattgggcccgtatccttctgtaaaacggtttggtatatagtaatcacagtcggcgccatacgtttgtaacgctgttagcatcacggaagtcgaactaacgccatcagcatcatagtccccaaaaacaagaatgcgttcttttcgtttgactgcgagggcaattcgttcaatcgtttcctccatccctttcaacaaaaagggatcgtaaaacgtcggctcttcgtagtgtaaaaagcgcttggccgcctggacggtttggattccccggcgtacaagaagacgggccgttaacatcgatacacgcagctcgtctgcgagctcttgcgccaacagctcgttttgttctaaaatgcgccatcttgtttttgattgcaacatatgtaaaaaacacccctcgaccatcctattatacaggaggggctaaggggtgacaacgcatttcaatgactctgttttttcatgtcttttttttgacggctgctttcatctggttgatctgcatttgcttgttttgcggtacgcagccgcttgatttcagcatttaattgcattactttcattagggacatcatccctgcgacaatcgctcctagtagcaccgagcccaaaatgactagaatcaatggccactgtgcttttaccactaacagattaactggtacgctttccacatttaacaccgcaaacacagcaatgataatggcggcaataatgccgataataaacgctgtctgtgctttcatgtcaatcccctccgctcaaatgtactcttcttccgttttctttggtttgttttttagtttcttttgccgcttccactcccagacaagccatatttgcgcacaaaggaacatcgaagaataagtaccggcaatcaatccaatgacaagagccaatgaaaacgagcggatcgcttcgccgccgaaaatcagcaatgccacagcagcaaatagcacggtcaataccgtattgatcgagcgtgttaacacttgaagcaaacttttgtttacaatttgcgccaagtgctcaaagcttttaatttccttctccttgttaatattttcccgcattcggtcaaacgtaacaatcgtgtcattgattgaatagccaaccacagtaagcactgccgctataaaaggcacattaatttcaacttggaacaagctgaacaaagcaataatgataaaggcatcatggagcaagccaataaccgctgaaaccccatataagaagtgaaaacggaaaccgatataaatgacaatccctaatgaagcgatcaatacggacaaaatcgcattgcgagcaagctcctggccgacgagaggcgacactgtactgacgttaggcgaatggccgtatttgtcttggaaataagtttgaatcgcggtaatttcatctttggaaagttccactgtaaaccgagcagtcgcactttggctttgctcgcctccaagtgtaatattcggcgtgtacgattcattgattgctgcaaagtcgtccagtaattgttcttgcgtcaatgtctgatccgcttgaatttccacattcgagccactttcaaaatcaacgcctaagtttaaaccaaacgtaagcaacaacacaatcccaaggacaattgacaagcccgagccgataaaaaaacgttttcggtgttttgtcaaatcgacattccacttttctggattaaagctcatcaatttcacctcttttcacgccaaaccagccaggccgtttatttaaaaatttgctgttcacccaaaggcctagcaatactctggaaccataaacggccgttaaaaagctgacaagaatgctaataatgagcatgaccgcaaaaccttgcacggagctcgtaccaaaataaaacataacccctgccgcaatcaacgtcgtaatattggcatcaaaaatcgttgcaaacgagcgcctgctgccgactttaaaggcagataaaatcgatttccctgatttaatctcttccttaatccgttcataagtaatgatattcgcatcgacagccatgccaaccccaagcacgagtgcagcaatgcctggcaaagttaacacagcattcattgcattaaagacgacaagcaccaaaaatgtatagatgcttagtgtaatgacagcaatgattcctgggaagcgatagtaaaccaccatatacaaaaagatcagcgcaaccccaagggagccagcaaaaatcgtttggttcatcgctttttctcctagcgatgcaccgacagatgtagagtagatctcatttaattcaacaggcaaagcgcctgcatttaatatttcagcaagaaagcgtgtttcctccgttgtaaaattcccttcaatcattacgtctcgtgtatgtaacggggcattaacggacgctgctgacatgtatttagggtcttgtttttttgattcttctgcaaagctatcgccttcttcgaagtcaagccagatgacgagcaaattctctcctagtggacgttcagaaatttcacgtgtgatttcgccaaatttgtctgcatcatttagcgtcaacgtcacaatcggctgattcttttctggatgtaccgatgcgctggcaccattttgggttaaatcgctgccatcaagaagcacgttgtcatcgacgtcacggatcgtcaattctgcaccagtcgccaaaatgtcacgtgctgtttcttggtcttcaacaccagctaactggacacggatccggttttctccttcaatttgaatgttcggttctgaaacgccaattgtatttaccctttcattcaatgcagtcgttgttgctaaaagcgaatcctgattaatttcatcgccttcattcatgggctccacttcgtaaagcacttcaaagccgccttgcaagtcaagcccaaggctgacgtcgtttacaacaggctttgcaaaataggcgattccagaagcaaacaacgcaataatgagaaagaaaagcgcaattttgccttttttaaccatagtctgtttatcctcctacgcaatctcgaatctgttacttttcggctgttgcttgctcaaatgttttgaaccagtcaatcggctccttatacgcatggactgtcaaccatgtcatgtacccttggggctgaatcgacagaagttcatcaacaaatgcgtagaaaggcgtaaattcttttttacgacgaagcttgtccactgcataattccacaactcatcttttgtgacacgattgtaaccaagctcgtggaactcttcctgtttaatggaaaggagtggttcgacgtcttcccgccaaccatcaaactgttgtttcatgcccatacacataccctctctttataactttaagtatacatatactaacaaattattgctattacggctatgaaatcgaatgaacttcattttgggaaaggcttgtcatgtcctgtccattgccgcatagacatgtataaaacgcggtagaccagcaaagaaggcgggattgccatgaacaagcaaacctttctaaaaggcacttttattttaattgcagcaggctttatcacaaaattactcggttttattaacagaattgtcatggcaagaatgattggcgctgaaggcgttggcctttatatgatggctgtgccgaccatgttgctactcctaacgttaacgcaacttggccttccagtggcgattgcaaagcttgttgcagaagcagaagcaaaaggagaagttggcaaaaccaagaaaattctcgccgttgcccttgccataacaggttctttgagcattgttttcacaacggcgattctcgccctcgctccactcgttgcccaaacgttattgacggacgcccgcgccttgtatccgctcttggccgtagcgccgattgtgccaatcattgctgtttcttctgtgttgcgcggctatttccaaggacgccaaaacatgaagccaaccgcttattcccaagtacttgaacaagttgtacgcatcagcttaattgccgtctttacagctgcctttatgccttacggactggagtatgctgccgctggagcaatgatttctgctggctgtggggaacttgcttccctcttgtatatgctgtatttgtttaaatcacacaaaccgttccgacttcgccgccagtttttttcgactgtgaaatcaggacggaaaacagcttcccagctccttgccattgccttacctaccacaggcagtcgtctaattggtacagtcgcgttgttttttgaaccgattgttgttgcccagagcctcgctttggctggagtagcgaccattgtcgcaacacagcagtacggcttgctcgtcggctatgtcatgccgctactcacattaccaacctttattacgtattccctttccgtttcgctattgccgagtttaagtgaagcagcagcaaataaacaaaaagtccttattcaccatcgtttagaacaagctttacgaatgggccttttgtcaggaggcatttgcgttgtcgttctttatgtatttgctagtgaactgaccgtgcttatgtacaacgctccacacgctgcctcgctattgaaagttatggcgccatttgctctctttttgtacttgcaaggcccccttgctgctgccctgcaagcattggattacgccaaagcttccatgattaatagttttattggcgccatcgttaaaacgcttgcgattttcgctttggcttctagcccgagctttggcataatgggagcagctttggctattgtaactgggtttgtactcgtgacgctgctccacattgctacacttgccaaaacgacaggatttgtgatccacgctgttcccatgttgaaactagcgctgctcatcgtcatcactggctatgcaggcatgcaaatagacacctatttattcaacggattgccttacgcagcaaaagcgctcgccagcatcgccataacttgtatgatctatgtatttggcattcttgcccttaagcttcttagcaaagaggaactaaaacgacttccatttatcaaaaagtttatgtaagaagcgctttccaaacaaaagcgctccttctttgtattaccagaagaataagcccgctaaggcaagaccggcaatagcgccaagggcaaccggatagcccnnnnnnnnnnnnnnnnnnnnnnnnnnnnnnnnnnnnnnnnnnnnnnnnnnnnnnnnnnnnnnnnnnnnnnnnnnnnnnnnnnnnnnnnnnnnnnnnnnnnagccccaaccccagccgtagccaaagccgcggttgccgagaggctgtaagtagacgtgtttattgtctactcgcataatccggccataatggcgcctgccattgtgttctgtaatgacgacacatttgccaatatgttgttggcaaatgttgtaataattctctgccatggtattgtccccctcttaaaaatccgtacacaatagcatatgagaaggaacaatagccgtgtccacgcctgtcacgagtgcaaatacctatttttatcggccaaagcaaacgggtggacatgtgatcactgtgtttttcaaaaagagtcaataaaaaacgattctttgcctttaagcgagcaataagcaatttttttaatatcgcggtagccaagtttgcgcaattgctggcgaagccatagctctgtttgacgcagttctcgcaaatggtcatgctggatcgtcccatcaatgattaatggtaaaggcatggccaatgcgggtccttctttctgtaaaggaggtgctactgtagggggcttgcttgtgtgctgtagtttgcccgactcgcctgtctttcgtttcaatatggctgctatcaccagcagaaagattggcaaaagcacccataacgaccaaaacgtagcgattgcttcaccggcaaacaaggcgagtgccaattcgaaagggccttgctgtgtttgtgttgtttcgtttttgtattgcttgatcagcacaagtgccgcgtaagtagctgcagcgcgcacaatcatggcatccatgcataggtctccccctctcctaacattccttatttgctactatgccctaaggggttgcttttatcctttgtcatagacatgttcccaggttggcaagcatacgaatagaaaaaacggtacgaggaggacatagaatggaaagcagacgtttttttccggcggtatgtattggcacattcgtgagtatatgcattgccgtcgcattcagtatactcatggctacattgctttatttgacttcactgactgaacagtctgttcattgggtaatggtggggtgcggttttttagccttgtttgtaggtggctttttttcaggagctaaagcaaaaaacaaaggctggctagcaggcgcatttacagcgtttttgtttgtcgccattctgctggcaatcagttacttaggctataatgaatccatcacctccaaccaggtgctcctctttgcaggctattgtgccattgcttctttaggtggtgtgtttggtgtcaatttttcaggcgggaattcataaggaactcttgctccttcacacacaaaaaagcccatccctttatttgagggcgtgagcttttgcttaaaaaggcgcctcccgctacttaagctaggcgctttcttgtattaatctgattgcaccacttcgcggatcgcgttacgatcatacgtaagtttgcggttgtcgttcaccaacaacacaacaacagattcgtcaatcgagtcaatgacgccgtgcaacccgccgattgtaatgactttatcgccgcgctgtaaatttgcgtgcatttcacgcacacgtttttgttgtttttgctgaggacggatcagcaaaaaataaaacagcacgataatcgcgataaacggaagcatactgacaagtaattccatgaaacacccccctttccttgctttaacgccaccttttctagagaactagaagttgcgtgcgttttccttgttaaagccgtattcctcaaaaaactgctcgcgaaaatcaagaaggcagtcatccataatcgcttggcgaacttgcttcattaaatttaaaagaaaataaaggttgtggtacgtcgttaaacggaacccaaatgtttcttcgcatttaatgagatgacgaatatacgcccgcgagtacgtacggcacacatggcagtcacacttttcatcgaggggactgaaatcacgcgcgtacttagcattacggacaaccaatcttcccgcacttgtcatgcaagtaccgtttctcgctattcgggtcggcaagacgcagtcaaacatatcaatgccccttatcgccccgtcaatgagtgaatctggcgagccgactcccattaaatacctaggtttatcttccggcattaatggcgttgtgaactcaagcacatgattcatgacatctttcggttctccgacagacagtccacctacagcgtaacctggaaaatcaagcgctgtcaaatcatttgcactctgtttgcgcagatcttcgtattcaccgccttgaatgataccaaataacccttgaacactgtctttgcctgaacgtttgtgttcggcaaggcaccgttctgcccagcggcttgtccgttcgaccgaagctttcatatagctatggtcggcagggtaaggtggacattcatcgaatgccatcataatgtccgatccaagcacatgttggatttgcatcgctttctctggcgaaagaaacagcttttcaccactcaaatgattgcggaaatggacgccttcttccgtgatcttgcgtaaatcactaagggaaaagacttggaagccaccagaatccgttaagatcggcttatcccaattcataaactgatgaaggccgccagcttccttaataatctcttctcccgggcgaagccataagtggtaggtgttgcttaaaataatttgtgcatccattgctttcaagtcttctggactcatcgttttcacagtcgccaacgtacctaccggcataaacatcggcgtttcaatcgtgccatgaggcgtatggacacgaccgagccgagcgccagattgcttacatgtttttatgtgttcataggtgattgctgctgtcactatttgtctccccttacggtcgtataaacattgcgtcgccgaagctaaaaaatcggtagcgttcttttatggcgtgtgcataagcatccattaatgcctctttgcctatcaatgcgctaacaagcatgacaagcgttgattttggcaaatggaaattcgtcagcaacccgtcaattgcctggtatttatagccaggataaataaagatcgacgtccagccagatgccgctacaaaggcgccatgatcgctatagatcgtttcaagcgttcttgctgaggttgtcccaactgcgataatgttgccgccattctcccgggcagaagccagcgtgtgggccgcttcttctgtcacctggtaatactcggcatgcatttggtggtcttcaacagaactagcgctcactgggcgaaatgtccccaaaccgacatgaagggtaatatacacaatttttacgccttttgcttcgatctctgaaagcaattgctcgctaaagtgaaggccagccgttggcgcagcggccgaacctatctgcttcgcatacacagtctggtaacggtcggcatcttctagccgttctttaatataaggaggcaatggcatcgtccctagttcctccaacaattcataaaacacaccactgtagcggaattcgaaaatccttcccccttggggttggactgccgtgcatatcgctgttaactttccgtcgccaaagctaacctctgtccctatttttactcgctttgctggctttacaagcgtttcccaacagtcgccttcaagctgttttagaagcaacagctcgatgactgctttcgtttctaccttttcgcctaaaaggcgggcaggcatcactttcgtatcatttaagacaaggcaatctcctggcgaaagcgcttcaatcaaatcaggaaacatccggtcgcttatcgcttttgtttttttgtcaaccacaagcaaacgggaattcgtcctagtcttcaaaggagtttgggcaattaattcttcaggtaaatcaaaatcaaattcatttacgtccatgtcatcacctatctatcttacgcattccaatcaaacttttcctagcatacatgcgtttttcatttagcgcaagcacttctaacggcggaagagtgagaaaagcagggaaagaacaatgctaataataatgcacgtcatgatcggaaagtaaacagtcgtttgcccgcttttaaacaaaaaatcccctggcaatttgccgattggcaaaaagcggcccaacacttgccaaagaaaacccacaatgagcaacactgcgccaatcaccattaatgttttacccattttgcttttccactccataatgagcataacaagccggcgtcgctatccgcccccgaggcgtccgctggataaagccaatttgcagcaagtagggctcatatacttcctcaatcgttgccgcttcttcgccaatggtcgccgcaatcgtttctaatccaaccgggcccccattaaatttttcaatcatgccttttaacaatttatcgtcaatatggtctagccctaacggatcgacatggagctgttcaagggcggagcatgccctttccaacgaaatagcagcctcccctcctacttgggcaaaatcacgaacgcgacggagcaggcggtttgcaatccgaggagtccctcttgaccgccgcgccaattcaagcgctgcagacggctcaagcgtcgcttgaaaaacggtggcggaacgttccacaatttgagccagttcttcaggtttgtaatactcaagccttgccattacgccaaaacggtcgcgtaacggggacgagagcattcctgcacgtgttgtcgcgcccactaacgtaaacggcggcaaatctaatcgaaccgatctagcagttgggcctttgccaatgacgatatctagacaaaaatcttccatggccggatacagcacttcttcaactgtgcggttcaagcggtggatctcatcaataaacaaaacgtctcctggctcaagggcggttaaaatcgcggccaaatcgccagaccgctcaattgccgggccggaagtagtccgcaactcgccgcccatttccgccgcaataatcgccgctagcgtcgttttcccaaggcctggcggtccgtaaagcaggacatggtcaagcgcttcttcgcgcatttttgctgcctccataaacacagcaaggttgtgcttaaccgtttcttgcccgatataatcggccaatctttttggccgtaacccttgctcgctctgttcttccaactccgttgcttcagcggaaacaattcgttcttccattgtcatcccccttacttaaggacgttttaacataagcgcaagcgcacgcctaatatattcatctgtttccagcgtttccgcttttaactgtttttccacttttttcagctctttttcaacatagcccaaagcacgcaacgcttctaaagcatcctcaagctgtggatttttttgctgtttgtcagcgccagcagcaggttccagcattggtgccatatcatcaagcttcccttttaagtcaagaatgatttgtcttgctgtttttttgccgactccagggaaacggacaagcagcgcctcatcttcttgttcaattgcatggataatatcttctggttctccagaagcaagaatggcgagcgctccttttgggccaatgccagagacatttaaaagcttttcaaacaacaaacgttctgtccttgttgtaaacccaaataggcgttggctgtcttcgcgaacatagtggtgtgtcgggaccactacctcccgatttaaatcgtttataaaacggtaagggtttgcacagtaaatttggaacccaatcccgttggcttcgaccacgagataagcaggttcaactgcaaccaaattccctttaatatagtcaatcacaagcattctcctctgcatggccaaaaagcgaacatttatttctattttagcatagcagatagctttccgtcattaagttgctactaagccagcaagtgggtaatgcgatagccagtgctgcagctgcccattatcgccattgtgctaacaggttttgcaaatgctcaaggctttcaatccggatgccttgttcaagcgccgcaacatccgattcgcttagctttgctgcctcaatttcgctataacgtgtgacaatctgtccagcttcttgtgctcctgtgtaaagcacgatccccctatcggcatctatgcctaaatagccatcctcttttacttcgggtgaaaggtcaagaatggttttccgaaagtggacaaagtggttgctttggtcaacaagctgccattcttcgtattccgcccaaaagtcgtcaatcgcccaaatggtttcctcaacacgctctgttcgtatatttccatcagcgaatacggtttcacgtaatacttccgtggcattaggcggatttgctacttggggagaatcattagacgcgtcttcgccaagaatgataaatgttcctagtagtaaagcgaatgaggcagctccaagagaaaacggaagccaatgtttgtggacaacttgctttaacatcatgaacatccctttccaatcatactattgctttatcctcggcatttagcttgtaatctatacgaaaatgacacaggattttcataaaaattgccataaaagcgcatggttattgttagaatgaaaagagaaattataaggagggaaacatattgagaaaattagctggagtggtcacggcctgtttgcttttttttattttgacagcttgcggggcgcaagaagatagtgggcaagaagataacagtactgcggaatcaagtgaaaccgttgtcattaaagcaatgaactggcagtttgataaagaagaatatgcggctggcgctggtgacgtgacggtggaacttaaaaatgaagaggggaaccacggcatcattattgtcggggctgataatggatccgatcttgtcattagcggttcggactcaaaaaccgtcacacttgaaccaggggagtatgaaatccaatgcaacatcccatgtggtcctggccacgaagaaatggtctcgactctgattgtttcctaattgctatgtagctccccattactggggagttttcagtctgatggcggttatcgactttgtcgacaacctcgctccccattactggggggtttttttacttattttgaaacgggcgctttgctgcattgcctaaatcgcgcatcatgtctgtaaacgtgtctcggacatcatcaaaagcagcgcctgagcgcaatttgtcgtccatttttcgcatatttttataaatgttgttatctgtactaacaacaacatttttgcctttgccggccaatttgcggacacggttttcgacatgctgttttacatcgtctgctttttcgtcttgctcatagcctacaacaacgtcgtcgcgattaataataacgcgggcttcccgaacaccgtcaattttctcaacttcttcgcggatctcttctacccggtcgccatcataattgcgatggtaacggacttcttccgtttccattccctgccgcatgtttccgtcttggttcgtagaacgctgtgcgtttatgccgcggtttccatctttgttcgttgtagctcgttggaaattcatgccgcggttgccgtagtctgctcttcgattaagaaaaccattttcgtcaaccattcctggacggttgttcccagttataccacgaacgtagccattgcgtccttgattatactggttagtccggttcatgcgttggtttttatttgaaaagcgattgtcgtcaaagaatgttttatcattcgtgttgtacgcattcggcccataatacggatagttgcggttgttgaagttgttgtccccattcagattggcttcttgattgcggtacgtgtttggctgcattccagcgcggttgttgtcttgtgttccgcagcctgcaagccctgttagaagcacgctcgcgcaaataaacgataaagctgtttttttcaatggaaattccccctttcggtcttagtatgtaccaaaaagggggaactacgctgttagattatggctgtcaaaaagccgttaatcttgttggtcttcttcttcgtatgcgtttatttgttcctccggctcgtattcctgctcttgcaaatacgggctttgtggatgtgcccattgctgtggctgggctgcataaggccccgttaaaaaggatggagcttggttcatgtaatggggctgctggtataattggtcatcaagctggccgacaggcggctgcctatagggtcctgcctgttggtttaatgttcctggagcaaaaaaaggtgtttgcggaggcggatagctgtttgctactggcatttgcggcaaagcagctggctgccaccctggatagctctggaatggtgcagcatcgccgatttctccttgataaggagagtagcgatattgtccccaattaatgtccatttgctgagaaaatggttgcgccccgttgctttgtccccagttcatctctacttggtgggcatacgcttgttcttggttccatcctttattttcctgctgtggccaaggggtaaagtttgtgttttgttgcccttgaaaacctttgttttgattttcttggatcggatagctttgttgattcggtcccccgctttgttgcacaaacggggcgttgcttccccacggagactgctgaccatgaatgccgctttttgagcttcccttatgtgcttgtggctgtactccattccattcgcccgcctcgttgtcttttttatcctgtggcaacggctgatgtttgcctgcgctttcttgctgtttaggcccatgcgactgagcttggagctgcgcattttctccatatgcttgtggctgaaatatttgtggctgataggactgcggttggtttgcttgtggctggtatgactgtggctgataggactgcggctgattcgcttgtggctggtatgactgtggctgataggactgcggctggtttgcttgtggctggtataactgtggctgataggactgcggctgattcgcttgtggctggtatgactgtggcggataggactgtggttgatttgcttgtggctggtatgacggcggttgattcatttgctggctgtaaagctgttggtttggtgcgtaagactgctggtacatatttgcttgtggtgcaaactcttggaatgcatttccttggcaaggtgtacaaggcggctttggcggaagcggcggatattctggcggttttgctacaccttgttgtgtttggccataatagggcggcgctggcgcgacatttgccgcttgcgttttctctgatgccttcagctccggctttttaggtggtttaacggattgttctttcgctttttgctgcttcttatctacttcttttgctttcggcgtcgtctttttctgttctttccggacagcaactgatccagcaggcactttcactttcatgcctggcatcaacatttcagggttggttaaattcggattcgcttcttttaaatgttcgtaatcgacttcatacttctccgctaatttccataaagtatctcccttttggacaatatggattctcacaggctgttccctccttactaggcattcatcctatagactatgcaagagcataaaatcggttcacatgcaacgttccccaatacttatgtgtaaactgctcggcctagaccaaaaaaatcaatcaaacggtttgaaaacccttgtcagacagggagtgaaaccgggaagggatgcaattaggacgagagttcgtgagccactgcttcttgttttaaaacgctcgtttcacagtgtaaagtatacagagcgtttacaaacctaaaagagcggttcaatgtacgctcttttaggttgtcgctccaatcattaaactttaaactgttgccagcatccgcgctaaagccgttcttgcttcctctgcgacatcttcggcgaccgtaatttcaaattggcgtttgccttcacgcagcaaatccagtgaccaagcaagatgatccaaatcaatgcggttcattgttaaacaaaggcacatagttgagtgaagagaaaacacttgcttatcgggatgctgtttcgctaaacgattgaccaaattcatttccgtcccaattgcccaggatgttcctggctccgcctgttttaatgtttcaataatgtagtgtgtgctcccggctttatcagcagcttgcacaacttcgtgtgtgcactctggatgaacaatcacttgtgtatgcggagagcggtcacgcacgtttttaatttgctcaactgtaaatttttcatgaacagagcagtgccctttccataaaatgacgatgatttcttctatgttcgcaccaggggggagttcgagttcatgtgtatgaggattccagaccgccattttttctaaaggaatcccaagtgcaaaagctgtgtttctccccaggtgttggtcaggcaaaaacattacccttggcttttgagcaaacgcccactgcaccatgtttttagcgtttgatgacgttacgcatgcgccaccatggcgtccgcaaaacgctttaatttcagcggtgctgttgacatacgtcagcggcaaaatcgtgtctccgaatcgttccgtcagcgctacccaagcacgctctgtttgggcgatcgaagccatatcggccatcgaacagccagcggcaagatcaggcaggatcacatgctgctctcgactcgttagcatgtctgctgtctccgccataaagtgaacaccgcaaaaaacgatattggccgatgacgtttggccgcacagttgcgcaagttgcaatgaatcgccggtgaagtcagcaaattggataacgtcctctcgctggtaatggtggcctggtatgaggaggtcattgccaaaaaatgcttttgcttcgcgaatacgggcttctttttcagcacttgacatttcccgatagtgatggggcaatctcgctggttgcattacttgcattgttcttcccccttttgtataagcatgctcaaatcgagtgcaacaactgaatgtgttaaaaatccaagcgacagaaaatcaacgccagtattggcaaattgccgcaaattggccatcgttatccctcctgaggcctccgtctttattccagctgggacataggccaagtaagtcctaatcgcctctggcgtcgcgttatcaaacatgatcacatccgcttgcgcggcgactgcttctttgacttcgtctaaagtcgtcgtctctacttcaatttttgccatcggcccagcataagcgcgggctttttcgattgcggcagcaatggacgtgcaagcggcgatatggttttcttttaacatgagggcatcgtcaaggccaaaacggtggttggctcctcctcctatcctgactgcaaatttgtcaaacattctaagccctggcgctgtttttcgggtatcgcaaacacgaatgcttggatcgcctaattcttccactgcttttgctgtcagtgtggcaatgccgcacatacgctgcaataaattgagcaatacccgttcgcccgataatagcgatttgaccggccctgtaaagcgagccaattgctgccctcgtttcacttgctctccatcgcaaacaaacagttcgacttcaatgtcagaatcgagcaaagcgtatagctggttgaccacttgtgtccctgcaaaaatgccttcccctttggcaactataacggcctctgctctttcaacagtgaacagcgcttcagctgtacggtctccataaccaatgtcttctgccaaaaatccccttaactgctgatcaagcttgagcgggttcatattctctctcctctgttttcacgaatgctttattctgtacagaaaaacaaatcgagcgcttccgccattgttcgtctgctgacggataatcgctgcgcctatgggtgcctcttgtttccgtacgcaacaaagctgcttttacaacaagcgtagcaagctcatacatagtacccgtttctagatcgtcaacgtgcacaaccgttttctttggcatttgttgaaacgaagaaagccaattagccactgtttgcaatcgataggcgtcgcgttcaatgcctgcataggcgctcatcattttttgcaattcgctacgttcaggaatcccgtgtatcaatgccttattcggctgtggcttaaccgctcccgcttttgtttgtggatcggccaacaaagccgctgccactgcttgcccgtaaacaagtgcttcgacgagtgaattgctagctaaacgatttgcgccatgaacacccgtacaagctgcttcgcctatcgcgtacaacccatttaccgacgtgcgcccaaatcggtctgtctcaatgccaccgcataaaaaatgggcgcctggttcaatcgggattaagtctttgcgaacatcatagccatttcgttgcagacgtcgataaatcgcaggaaaccgacttggaaaatcatgcaaatgcctagcatctaaataaacattctcgccagattgcaacgctttatgtaatgtggccgctacaacgtcccgcccttcaagttccccttttgcccattttcccattagccgatggcctgcccgattgaccaagtaagcaccttcaccgcggactgcttcgctaataaggctcggttcttttccttttaaaatcgtcggatggaattgcatgaactcaagatctttaaggacagcgccagcccgataagctaacattaacccgtctcctgttgctctctgctcattggaactattttcatacaattggccagagccgccagttgctataaccacacagtcgccgtaaaaagcgtgattaacggtgcgaacgccttggattgtttgatttttcacaatcaactccagcacatattggttttcgtacacatgcacgttttcactgagtgtccgccataatgtttcgacaactgctaagcctgtttgatcttgataagcatgcaaaatgcgccgcttgctatgggctgcttcatggccaaggacatattggccagctgctttttcaaacggcacccctaaagcatcgagctctttaatcattgctggagcctgccgagcgagctcagacgcacgcttaaacgcattaaaaccgctgcctgcgacaaacgtatctctcgcatggagtgtcggatggtcggtttcgcctactgccgccgcaatccccccttgagccatacaagaattgctgtccaacctgcccgccttcattaaaagcgatacttctgctttatctgctaatttgtgggcagccattagtccagctataccggcgccaacaataataactgatttctttttcatagactcactcactttacagttgtcttgtcacctatatttacataaactaatagaaaacacaacctttttttaagaatggagattgccatgtattatttagactatagcgctactacgccgctttcgcccctttgcttagacgtatatcaaaagacagcccaattggcttttgccaattcaaatagcctccatacttttgggcttgaagcaagagcgatccttgaacaggcgcgtacgaagtttgcatcattgcttcgccttacagaagaagaactgtattttactgggtcgggttctgaaagcaattttttagcgattgtctcattagcattcgcttaccgtaataaaggtcagcaccttgtctccaccaagacggagcacccttctgtccttgaagcattgcactacttagagaaacatggatatgaaatcacctatgtacctgtaacggaagaaggaaacgtaacagtcgaagcgcttcgtgctagcttgcgtcctgacaccgtgcttgcctcgattgctgtcgcttccagtgaaattggcacagtccaagacatagctcaccttagcaacgtcctacgctcccgtggtatactgtttcatagtgactgtgtacaagcattaggaaaaatcgaaattgatttttcattgcttgatgcagcaagtttttcggctcataaattgtatgctccgaaagggacaggtgctgtgtatttgtcgaaacgtctccattggcgggggttttacgaacaagcccgtcatgaatcaggatttcgtccaggcacagtggacacgccagcagttgctgcctttgcctctgcagtcgaacacgctctttcaattcggaaaacaaggatggctgagctagcggaactacgggatacaatcattcgccagctgactgcaacagggcattttcaattagtcggttctaaaaaagagcgcctgccttttcatattggcatgctcgtcaagggatggagcgggcagcaatttatgcttgaatgcgaccgggctggttttgcgattgccactggttcagcttgccaagctggccaaaccagtccgcctctctcccttttggcgcttggtttgacaaacgagcaagctgaccgctatgtgagggttacgttaggagaaccgacgacggaagatgaagtcggtatgtttattgaacactgtaccaagattgtatgtaggtgagataaagatgagaaaagagaaaaaattaaagtcagaagagcggcgggctgcgattgttgagtggctaaaaaaggaaaaagccccgttaaaaggcagtgatctcgccaagcgggcaggtgtcagcaggcaagtcgttgtccaggacatgtcgcttttgaaagcgaaaggggaaccgattttcgctaccgcacaaggatacatgtacttggccccggctaccaaacagaaagtccagcgtttgattgccgtacagcatcgtcctgaagatacacgggaagaactttacacttttgtagaccacggccttactgtcatcaacgtttcgattgaacatgccatttatggtgaattaacgggagccatgcatatttccaaccgccaagaagttgacgctttttgcgcaacacttgctaaaacgaaagcaagccttctgtctgaactgacagaaggcgtccacctccatttagtagaaggacaaaacgaagcacaagtggaaaaggcgatcgccgcgctccgagaaaagtcgtttttgttagaagagtagctaggcgctactcttcttaattaatcgatgctgtcgcctttgaactgtatgtcgcatagctgccaaggacttcaactttacagccaagtgcagtaagctcagcaatcgctcctggcactaggacgtcatccattaactggtcgatgtcaatcaggaaaaagtaatttccgaggccggtttttgttgggcgtgattcgattttggacaaattcaactttcgccaagcaaaagcggacaacacttgatggagggctccggcaaaatcagacggcagcgttaccatcaatgttgttttgtctcctgtatgctctgggcctactatgtgaggagcttgttcctttttagccgttagcacgataaagcgcgtccggttatgttcgaaatcatggatgtctccttgagctacagctaatccataagtcgaagccgcttgcgcgttggcaatgacacaagcatctgcatcggggttttcagcgagccaagcggcagccgaaccagttgaatcggcatactcgatttcaatttcaggatagtttttttgcagaaattgatggcactgggcaattgcttgtggatgggaaacgactttcttaggaacgaacgtttcccggtctttgtttggcgaaaacagcaaatgttgcgcgatttccagagatatgcttgctacgatcggcatgggcttatggtggattaaataatcgagcgtaatattcacagttccttcaatcgcattttcaattggcacaactgcatagtcaatcccttttgcaaatgcgagatccagcactttggggatggttttcagtggaactaactcttctttcggaaacaggctgtatgctgccatttccgtaaacgtgcctttcgggcctaaaaaaccgacttttttcacaaaaacgcttcctttctatgatcctgaaccaactagttccacccgttcaacagactcaagcgcctccatccgttcaaacagttcgtttatgtctatttcaatcggggctgtatcgacagatagggttatatttgctctgccttgcaaggggatcgtttggttaatcgttaaaatattggctccggtatcggcaacaatgtttaacaattgcgataaggtgccagatcgatctgcaaggttgatagagaacgtcatgattcgttcttttgcaatggcatggaacggaaaaatcccatctttgtatttgtaaaatgcactcctgcttaaaccgacacgatggacagcttcattgattttgcggaccttccccgcagaaagaagcgccttggcttcaagcgtacgctgcatcgcatctgtgagcatatcttccctgaccagataaaactgctttttcgacattggcacgccctctccttcgggcagtttttagggctgtgtaaaacgcccttgctacatttgattataaaagatgtgtgtctttcgtttcaacaaatcatttaggggaaggtagcagaagcaattggatatagctttactccttttaaaaaaggccagtacagcatagactgcctggcccgactaactcattcgacaaactcgaattcaaatttcataatacggactaggtcgccgtcttttgcgcctcgcttccgcaacgcttcatcaacgcccattttcctcatcctccgggcaaagcggcgtacagattcttccctagcaaaatcagtcattttaaaggcacgctccagttcagctcccgataattcaaacacgccatcgtctccacgggtgattgtaaacggctcaattggcaattcatgtttataaagcactctgccctctacttgctcttcgctgtcatgcaatggaaactctggcgcatgctccaattcatcagcaatcgctagcatcaattcacggacaccgtctttcgtgatcgccgaaactggaaaaattttcgtttcctcgccaagtgcctctttaaatcgcttaaggttttcatttgcttctggcatgtccatcttattagcaaccactaattgggggcgctccgtcaaccggtaattgtactgggatagttcttcattaattttgtgatagtcttccacaggatcacgcccttccattgccgacatatctacaatatggacaatgacgcgcgtccgctcaatatgccgcaaaaattggtgaccgagcccaacgccttcatgggcgccttcgattaaaccaggcaaatctgccatgacaaaactgcgcccgtcctgtgcatccactaccccaaggtttggtgtaatcgttgtaaagtggtattcagcaatctttggtttagcagccgacacaatcgacagaagcgtcgattttccgacactaggaaaaccaaccaatccaacgtcggcaagcacttttaattcaaggagcaaattccgttcttcccctggctcgccattttctgcatggtctggagcagggttggcaggtgttgcaaaacggacatttccccgcccccctcgaccacctttagccacaacagcccgttggccgtgtgtagtcaagtcagcaagcagcgcccctgtctcctcgtcggttaccatcgtaccaggaggaactttcacaactaagtcttcggcctttttgccgtgcatgtttttagacatgccgtgctcgccccgttttcctttaaaatgtttgttgtagcggaaatccattaatgtccgcaagccttcatccacttcaaggataacactggcaccgcggccgccgtctcctccggctggtccgccgtcaggcacatatttttctcttcgataagccaccatgccgttcccgccgtctccacctttggcgtatactttcactttatcgacaaacatcttcgttcactccatttcctaattggaagctgttgcatccagtaaaaacgttactgtataacctgcttgttcttgcctagttacgtcgacgacgactgaaggaggcatctcgctaaagcagttggagatactgtcatttctgtatatatgcccttgatagtcaagttcgattaaacagttttggtcaaaaaacgtgtacgtaacaaaaacggaactaggcccatctagctgcggccattcagacagcagtgaaaaaaagcgggcaaaacatgtagaaaaagcattatcatattttgccaagtttaaaagaggaccgtccacttcgtatgcaatctcataagctgattggtgccatttttgctcaagtaaaacaagcgctgtttttggcatccccatgttgcacaggcggctctcatttgtcgtttgttcaaccgcctcctcaagaacagcctcagcccgctcctgattgccgatcgccaagttcccttttattagctggagcacattcagccagtcatggcgaatagatcccaatatgcgaatcaattcgtcgttgctcctcatttccatacgtccccttctactcacaatttccctgcatatcttttcaattgtaccacactgttatgccgttttcataacggaatcaggatgtctttttttcgtgcttgtacctaatttatttgcttttctgaaaaaagcctttacagttttgtcaacaacgaatataatagaaaaggtgttcaatcaaacgcaaaggagatgaacaaaatgacaacaatcatgccattaaccattcaactgcatcgttctttttgttcacccactatgtgcgtttttgcattggcttcaacagtttgagcttataagcaatcgcagggtgatagccctgcttttttgactgcagggagacatctgcggtttttttgtgggcaaaagctggaaaaaattgagagggggataaaaatgtatggtttgttccaaaaactaggaaaaaacacaaagcagtcgattttaaataagcaggtgccaggttctacctaatgactgcaccttcagaggaaggaggcgatttcgtagatgacgttttcatttattttttttacgataagcattaaaaagcgcaagcgcccggagtattcccgcgccgaactagaagcttttatccatgccgaaaaaatggagcaggaatacgaacagctaaaaacacgctatttgcatcacctttaattaatgagaaaaacgacgtagggctttgccttacgtcgtttcgttcattagttgcttcgcgcatgcctgcccttggtcaatacaatcaggcacacctactccgccaaaataagcacccgtcacgtacaagcctggatgtttggcacaggcttttttaaagcgttcaatccgctgaagatggccaacttgatattgaggcatcgcctttttccagcgcgtgacacgataaaaagtaggtcgggtacggatcgccatgatgttctgcaaatcggctaaaacagcatttacaatggtctgatcatttgcttctacgattgcctcttcgcctggccggccaacataagcgcgcaacaacgtttcgcgagaagggcttgtatgaggccattttaaatcggtccatgtgcaagcagtaatcgtttcatcgcctcctctggcgacaacaaatcctgttccttcatgctcattgtcaacagcgccctcaggaaagatcatggcgacagtggcgcatgaagtcgcctcgatgcttccaatatcactaaacgggttaatctctacaaacaattttgccgcttgttgtggcggaatcgtaacaatcacagcatcataccgtttttgggtaccgttaacaaacacggtaaaagccccgttgtcgagcacatcaatccgttctaccgctgcatttaaatgaacagacccagggcgaagctgttcggcagcagcctccagcaccgacgccaacccggatttgactgttaaaaacattccttgctttttcgcctgcttacttgttgatttcgttgcggctaccccttttaaaaggctgccgtattctgcttcgtattgaaggaaatgaggaaatatcgctttcatgcttagttcataaatattgccgccgtagatgccgccgagcaaaggctcaatgagcgaatcgaccatttcttttcctaagcggtattcaaaaaaagcacctgctgagacgtcttctcctggttttgcaaatcgcggcttctcatattcttttaataaattgcgtttcccttcatccgaaatcagtttcgtttccaaaaacgcatctatgtctgtcggaatgcctaacaccgtattttttggagtcggaaaaagcgtaccgctctttaaaatataggattgccccacttcattgcgaacaagggaatcgccaaggcctactcgctgaatgaaatgagtcatgctcgcttttcgctctaaataagagtcagcgcctccctctattacaaaaccacggtctttgtacgtaacaattttgccgccaacttgatttgaagcttcatatacatcgtattgtaagtcgctatgatcatggagccagagtgcagctgacagccctgtcgctccagctccaacgatggcaacacgcttttgcttcatttggtcaccacagcggccaggcgttttgtcactacatcggcgagcgcctttaagaaacgagtgtctgcatttggcatcggcgggcgcaaatagcgaacgcctagttcgtctgtaaccaacttgcattcataatcattgtcgtaaagcacctccaagtgctctgccacaaagccgactggacagtacataaaggttttgtagcctttttttgcatatagttcccgtgttaggtcttggacatccggccctagccatggctcaggggtgttcccctcgctttgccacccaatttcataattcggtacattggccatgtccgcaagcaagtctgccgtttcccgcaattgctctggataagggtcatttgcttgaatgattttctccggtaagctatgcgcggaaaaaatgacacaaaggtcatcaatagaatcggccttcttcatttcattttcaatttgctctttccaaaactgcaaaaatcccggctctttataccagctttcgattgtataaattgtaggcccgccaattcggtccgcttcttcctgagcgcgcttattgtaagactgcacgctaaacgtagaaaaatgaggcgcaaggacaatcgaaatagccgtttctatgccatcgttcttcattttttgaaccgcatcttcaataaacggatcaatgtgtttaaggcctaaataaggcacaaaaacgatgtcttcttgctgctcatttaaaacagcagcaagcccgtttgcttgctcatccgtaatgcgagccaaagggcttgtgcccccaattgcttcatagcgttcctgcaaatcagcaagtgcctcttctgaaggcttgcgtccgtggcgaatatgtgtgtaatacggttcgatttcttctttcttgcgcggcgtgccataagccatgacaagcaatccaatttttttcttctccattgtcctatcctttctgttgttttttttctgatgagtactcatgaacaaacgcagtgagtcgtctcaatgtttcaggtttcacttctggaaagacgccttgtccaagattaaaaataaaccgatttgactccatgccttcatctagaatagctttggcttccgcctcaattacaggccatggcgcaagcaaaagggaagggtccatattgccttgcaatgttttgttaatgccaaggcgtctcgcttccgaaacagtcgtacgccaatcaatgcctatcacatcaactggcatgtctttccattcggacaataaatgaggggttccgactccatgtaaaatgagcggtacaccctctgtctgaacttcagccagaattcgcaccatcaccggtttaatcaatcgtttataatcagcaacgctcacggcgccaatccaggaatcaaacaactgaattgcttgggcaccagcttgtatctgtgcttttatgtagtcgattgtcatcttcgcaagcttgtccattagacgctgccatgcttccggttctgcatgcataaatgcttttgttttatggtaattccgagaaggcccgccttcaatcatatagctagcaagcgtaaacggtgcaccggcaaagctaatcaatggcacgtcaagctgtgtgcgcaacagcttaatcgtatcaaggacatgtttcacatcatgttcaggatcaatttcccctaagcgctcaacatcactgaggccgtggattggattgtcaatcactggtccaattccagactttatgtccacttcaacgccgataaaaggaagcggtgtcattatgtctttgtacaaaatagccgcatcattgttgtattggtcaactggcagctttgtcacatacgcgcaaagctccggatcatgggtaatatcgaataacgaatgcgtttctttaattttccggtattcaggttgcgaccttcctgcctgcctcatataccacacaggcacatggccatgtttttcccctttgcacgctttcaagaacgtgtcattaaatgttttggtgttcatcttttccacctttcatgcatctggcgtgacaaatcgttttccattttacgcgaaacctatttaaaattcgattaatctgcctatactcgatctcttcctctactactataataacctcactgctttttgtatacacctataggacgattgtcacgaaattgagctattctaaaaaaagccgtgatcttacggctcaaatgaatgttgctttcgttcattccctagttttatgagatttgccccatctataaaaacaaagaagccgctacaggagcggctttagaatgaaaatgaaaacgaaggttcgagcgcttcagaagcagccccttcggtatccgtttctaggtcataggtgaccacttggtatttcggcaaagagaatggattcatttttccaatcgtaaaatgaggttctgttaatttggaagcaacttgtttcttggaatcaccgtcgacttcatacacattaaaggcaatacgctcatcttcaaccgcgtcccattctaactgaacacttattaaacctttgccgccaatcgtgtattgggccgtgaaaccttcaatcttttccattgctagcggagaagctaaatcagcagtaccttcaggctgttcgaacgccgttgcctgcaatgaagcaggaaaggagttgaccatttctttgaacaaccgtgtcggatagccacttcccccggcgaagtattggctttcgtttgtttggtcataccccatccaaacggcaccaaccacttttggcgtatagccaacaaaccacacatcgctgtttgccccggcaactgcctcgtatccttgcgttcctgttttacccgcaaccgcagacgtagttgcaggtccacttgcacctgtgccagcagccatgacattttccagcattcttgtcatcgaccatgctgtttgggcactaatgacttgtgtttcaacaggcttagcaccgccgatacgtttgtcattgctgtcatagatgtctctaatcacatgaggttcaataatttgtccttcatgggcaaatgctcggtaagcacgtaccatctcataaggagttaccccttctcgcaagcctccgagtgccaaggagagctgcctatcaggcaagtgaaagccgaactttttgagcgttgacacagactcctgaatgccgatttcatttaaaagccatactgctggagcgttggaggatgtggtcagtgcttcatacatcgtcatttcgccactatattcgccatttacatttttaggtgtatagccgtcatcgtactgaagcaattcatcgcgcagcaacgaataaggctgatatatgccactttctaatgccggagcaaacaccgctaacggcttaaatgttgaagcaggcgcccgctttacattcacgcggtttaagccgcgccgcacataatcacggcccccttggacagcgagaatgccgcctgtttctgagtccataaacatcatagcgctttgggcgtctttgttttcttctgggaagaaacgatcgttttgcagcgcctcatatgttttcttttgcaactccaaattcattggaaccacaatccggtacccgccagttagcagctcttcgtggctaatgttgaatcgctcactcgcttcatccatgaccatatcaatgtacgtatacaacgactcatccaccgtttgctcttgtctgtcggtttccagcggttggctctgcgcttcctcagcttcctcagtgcttaaatacccttgttgcgccatcacctttagcactaaatcacgtctctctttgttgcgctccggttcatcaattggcgaaaatgcgcttggtgcattcacgacagctacaagggaggctccttcataaatggttaattctgaagctggcttgttaaaatacaaatgggcagctgcttcaatcccataagcgccgtggccaaaataaacttgatttaagtacttttccaatatctcgcttttgctgtaacgccgctctaaattcatcgcgataagcacttcatttgttttccgtagccatgctttttcgttggagagaaacaaatttttagcaagttgctgtgtaagggtgctgcccccctctactttggcacctgctagaatatcacggtaaagggcacggccaatcgctttaaaatcaatgccctggtgttcataaaagcgggaatcttccattgcgacaaatgcttgttgaacaagttcagggacttgttcaattggaatcacttcacgattttccatatataagttcgtgatgacgttgccgtcggtatcaacgattacacttgaattattcatcattagcttttcttcatcgatttggtacgtgcccgccaatatggcgacggcaaagattaaaaaggaaagcaccatcattgctgctacgatgccagccgctagtgcgagttttttgaccatccgatgaccccctttaggccactggcatttgcttgacctttagcacaagcacgtaaacgttgcttgccaatgcttcaattatcataccggaaaatacaaaagcgcgcacagtcattcgtgtttttacaacttatttcgcaattatccacgcaaacttcataacttccccctattacgcttgttttcattgagcccattcgtgattttttgacaaaacccttcgcgcttcttcctaagcatgttacacttgagctagcatattatatggatagacgagtttaaggcaagaaggagtgtcatgttcataatggaagtcactgtaagcgttgcatttctagcaggactcgtttcttttttttcaccctgcatattcccgttgctgcctgcctatttatctcaattgactggatcagcggtttctgccggtgcggtttctgccccccgccgtgtcatcctatcgcgaagccttggctttatcgctggatttactattgtctttatgttgttcggcctaacaagcacggcaatcggccaattgtttatgggcaaccgttttttgcttgagcgaatcggtggcattattattattttattcgggttgcaaatggccgggcttttgtcaatccgtgctttgtttacagacaaacgcttgcaggcaaaaccaaagtcggcggcaagcttttcaaaatcgctgttgctaggcttcttatttgcagcaggatggacgccttgcgttggtttggttctgtcagcgattttggcacttgcttcgacaacaggcaagctctgggacggcacattcctgttgtttgtttattcagcagggcttggcattccttttttgttgattgcccttctttggtcccgctccttacataaaatgaagcgactgaacaagtatttgccaacgatccagaaagtgagcggatacatgatgattgtcctcggccttctgttgtttaccggccaattttccgcccttgctgctattatgtcccgttataccccgtcatggctcgggtaacaccataccatatagaggggcaaagccgacaaaatcactcagactgatagaaaacgcttgacaagcgagacgaacaacgaagaatcgagcgtttgactacaaccgaaagggagcgccacgtggcgctccctttgttgttttaccgtatcattattgcatatttaagcgattgagccagcgcatgcgatagacgttcattgctgtttcttctagcttttcgagcaatgtatggttgactgctccaccaacaacagccccgaatccaggaataagctgaaacatttttggcacatcgatataatcgcgatagcgcaactgcagtgcttgccaatcagtcgctaggagacgttgttctaaatggtcgcttatcgcctccaacaattcggctctatcgtcgccagacgaataagcgagttgaaaaatgagcaaaatcagttgacgttccgactcttccttaggcgaatatccatatgccgcggccgttgcaaacagtgctttaaatttaatggaaagcaataatggaaaatcacttaagcctaaaagcacgccccccgctccagtgccaatcccttcaaaaacagcagttctccggtatagttggaaaaggcgacgcacttcgtcgtcgcactcttttaacgtcattggcttttcctcaggctcttttgtcacgaacgtattccctgcaagcacagcttcaatcgttttttggacgcaaatcgttgctgtctggtggtaaacgccgggaagcctgtcgttgattttattttgccattcctttgttttagatgaaagacgtgatggccgctttttcattttacgctgccagcgccttagctcctcttccacttctttttcatacatgaaatcactccttatttcatgtatattaccgaatacgccggtattttcctcttttgcgatgaatgagcgtctggctgccgtaaaatgccaatacaccagtagcaacaagtgtaagcaagccgaaaatgactgaagtagagaccaagacaatgagggcaaatacaagcacaagcacggccaacaatcgcaatactaactgcgacatagccgttttttgctcccctggccgaatcgggtacaaatcgacccacgtacttgtagcatgatgaaaagacaacgtcgaaagctgcatcatcgtcatatgggtaaacaagaaagcaaccccaacttgcatccagcccgaaggaagaatgtaaaggataagggaacctactagcaataaacggacatacgttccaagataatcattggcacgaataaacgaccgggcatataagtactggtaaacagcacgcttgtcgccgccaagcagaggaattgcccattgcatataggtccttgcccgtacttttttccgaagttgaggcacatctgtaaaggcattggcaatccggtaaaaaaacaaaaccattccgctttcgatttcaattaaacgatcccattttagtacatgctttgttttgagcatccggaaataaaagacgtacaataacgccatcaacaaaagcaatgcaagcgtgagccagtaaggcgcttgatcaaacagcaagtacgcaacagccgtgttcaacaatagccttaaaacgatatgcgaagctcgttctcctctggatgttagacgttgttcataccacaccgctaacatattccatgctttgactgctaacagcaagacaagcgttacccaaaaaacagttccgcttccgcctcttgctgtaaacattggcccgcttgccataaacaacaacacaatatagcttgattgccaagcaatcgaataagcaatggaacgggcaaaataaggacgaagccgctcttcatacggcaacaaaaagacaatatcggcgggcttgacaaacgtgcgggtatggccagctgtcagcctccaggcaaatagtacggtaagcagctctgctacaggaaaatcggccggcattgtttcaagaaattgctggtagtagaccgttaaaaacaaaaacaaaaagaaaaccgaaccgacaaagccgctgtttaaaattagctttaaatagccttgcgcttccctccagtagttgtggcagcggtctgcccacaatgatttgccgtcaatcatggcgctcttccttcgtcatttcaatataaatgtcatcaagcgttgcgtctggtttgccgattgcttcgcgcatgtcggcaagcgtaccagccaaaacaacttgtccttggtgtaaaatgacaaagcggtcgcaatagcgttctgctgtagcaagaatatgggtagacattaacacagcagcgcccctgtccttcattttcgaaatccaatttaaaaacgatgtaatccctaccggatcaagacccacaatgggctcatcgacaacataaagagacggctctgtcaaaaaagcgctcataatcatcactttttggcgcattccttttgaaaaatggttcggataccattttttcattttcgccatattaaattcgtttaacagcctttcagccctttcttcaaaaacgctgtcatcgattccataagcgacactcgttaaacgcaagtgctcccacaatgttaactcatcatacaggagcggcgtttcaggtatgtaggcaaaagagcgtctatatgtgtcggcatcatcggcaaaagcaagtccatttattctcacgtccccactcatcgggtccattaatcctaagacatgtttgatggtggtgcttttcccagcaccatttaacccgatcaagccgacaatttcttgcttgtttacagtaaaagacacatcatgcaaaaccggttttttcggcgaataaccgccggtcaaatgttcaattgtcagcacgtcctaatcactccttgaagtaagtgtagcaaatttttttacatcgcgcactttctatggacagccatacccctttccacaccgtcgtcctgtattcctttattgaaaagacgttgcttctcctttttattgcaggtaaactggctgtatattaaatgatgaggtgatagtatgtccggtaattgcgtattttgtaaaattgtccaaggagaaattcctgccgtcaaactctatgaagacgacgagattgttgccttttttgacatttcgcaagtgacaaaaggacacgcattagttatccctaaagcacaccatgccgatatttttagcctgcctgagaaaacagcagcaacgttgtttgcggcagtgccaaagctggcttcagccttaaaagcagagttcgctcctgccgggatgaacatcttaaataacaatggcgaggctgccgggcaaaccgtctttcattaccatctccatctcctccctcggtatggcgagacaggtttatatggctcattatggaaagaagctactgtaggaacaccggatatggaatcattgcaagcgtccgctgaaaagataaaaataaatttttaaatgaagagtcttaaaaggtgtcaggctgtagacaaacgcgccaaccgtcgtgttcgacaagcgttttcgaacagcctgattgactttgtcgacagccgatcacgttcgaaaaaacgctgcagcaacatacgctataaaactaagcttttaaagcttggcttggtgggagaaagtcattttttcataaaacttttttggaaaaatgcacatgatgacgccaaactgtggtatgattctgataataacacactttaaagcaataaagatactaggagtggtcagccttgaacgatgtgcataactttaacgcaggccctgcagctcttccaaaacaagctttagaaagagcgcaaaaagaactggtcaattttgacgggacaggcatgtcggtcatggaactgagccaccgcggcgacacgtatgaccgcatccatactcatgcgattaagaaaataagaaaattgttggaagttcctgatgactaccacatcctgtttttgcaagggggcgccagcttacaattcccaatggtgccgatgaattttcttgattcgcaagcaacttatatactgacaggagcatggtcagaaaaagcgctcgcagaagccaaacatttcggcaaaacagtcattggcgcatcgggaaaagacggcaattataaacaaattcctgctttaaaccagattagcgaacatgcgcaagattcgtatgtccacatgacatcaaataatacgatatatggaacccagtggcatgcctttcccaatacgaaagcgccactcgtgtgtgatatgtcaagcgacatcttctcgcgccgcatccccgtaaaccaatttggcctaatttatgccggagcccaaaaaaacttaggcccttcaggggtaacgctaatattgatccaagatgcgtttttgcagcgagctaaaagcggccttcctgcaatgttgtcttatgatacgtttgttaaatcaaattccctttacaatacaccgcctgtgttttcgatttatatgctcggtctagtcctcgactggctagaagaatctggtggtttaacagaaatcgaaaacaggaataaagcaaaagcgcaacttttatatgaggcgatagatgaaagcgacggtttttacattggccacgccgcccaagattcacgctcaaacatgaacgtcacgtttacattagcaaatgatgcgttgacttctgtgttcttacaggaagcgaaagaagcagggtttgtcggtcttaatggtcaccgttcagttggagggctaagggcttccatttataatgctgttccttacgcctcttgtgaagcgcttgttgattttatgaaacaatttaaaaataaacatgccgagaaaggagccaccgtatgaaaaaatgttccttggtagccggaatcgctgtaggctttgtctctgctggtcttgctactttgttgtcagctccacgcagtggcggggaaacgcgggcatgtttgcaacaaacatacaactctagcaaagattgtcttcaaaccatttccttgcaagcgaaacaagtcgccagccacacggcaacagtcgtcgatttagctaagtctgtcggtaaacaaactgcttccgaacttagccaatcgattgagcaatggaagacagaaacgaaaccggcaaccgaagcattacaacgccacatcaatgaagcgcaagcatccattagccagttaaacaaagacaaatcccgtgcctaaacatgcgtttaagcacggggatgcttttttcctgaaaattggctctttatttattgtcgatttttcggcataatataagaaaatatataaagataacatttgtttaacaagttttcggaatggaggagatggatttgaaccacccattaaaagaatcgattgtctttagccataaaatggcgttgttaagcaaagccctctggaaatctgttgaaaaagattggcaagcatggattaaaccattccaccttaatttaaacgaacaccatattctttggattgcctatcagcttaatggcgccactatttcagacatcgcttcacacggtgttatgcatgtctccaccgcctttaatttttcaaaaaaacttgaagcaaggggattgctttcattttcaaagaaaaaagacgacaaacggaatacgtacatttgtctaacagactctggccgacaactgttccttgagacgatgagagcctttaatgagcatacgtaccatgtctaccaaggagcggtgccgatgaaagaactttatgggaaatttccggaattctctgagcttatttgtattgtccgccatatttatggcacggagtttattgagcagtttgatgcttgtctaactgatttccaaaatgatgttgaagaaaaagacggccatttaaaactggcttctgccaacctcttccccttgcaacctgcaaaataaaaaaacggcggataattaattatccgccgtactgttaggccgcaccaaacctaactcaatttcatcatgagctaaatccactttgttgaaccgcaagccatatggcaatgtctcttttatttcgcttggatgtaacagcacactttcttctgcagggtaaattgtcacccactcaggcaaatcagcgagttgggaaaaaatccgtaatgcatatgctggagaaatttgaagcgcacctgcgtttaaatgttcagcttttaataaaagcgacccatcctcacgcacttcaggcgcaaatctcatcgataaatcaacgtctccaatgaaaacatttacttctcctgtcaaataaacaccgtcttccgctaagtgaaaagcaaacggcacgtcttctccagactttgtcaaatctgctagcagcatattcatttggtcacggttaagctgaatggacaacatgtcgccgcttgtcccctgttgttcagttgccggcaaacgcgcctcctcagagcctgcgaataaatagatgaaaaacacaataattgccgttgttagcaatacaaacaggctagccgcaacaaaaaagccgactttgtagaatcggtctgtctgcgtcactcttttttgctgcatcccctacacacctttcattagcttgtccacaagaaaaagcatctgtttaccgttatacccttttttacccgttttgaatagtccctttttcatggaaaagccatccgggggagagccggatggcatgagcggactagcaaatccaagatgcaccaataataactagcaaaatgaaaagcacaacaattaaggcgaatccgccgtggtacccgtatcctccgcctgcataactcatgtacatttcctcctttgataatttcacaagatatttgataaaagcatattagagggatgccgcctgattggggccaagcgcactgtttgacctgtaatttttgaaaaaccatacgataaatggcgcaatttcgctttttgcttggctttcaaacagctcctctatgctttgttaccatatcctatgcaaaaacaaattatgggtactgggcaatttgcccaatttcattccttatccggcgattgttggcagcacgtatttatggtatagtatggtttgtgaaccttgataaactagctgtttgcctacggacaagcagtttgaaaaagaaaattcgtgatcaccgaggagtgtgcctgaatgaaaaagttggtattagcagcagtaggtgctgtcagcttaaccgtctttgctggttgtagcgatgacagcgaaaacgcagtagtggaaattgatggggaaacagctctcacaaaagatgatctatatgattcttttaaagagacgcagcaagcccaacagcagtttgtcaaccaaatgagtacagcattgctaacacgtgctagtgaggatatggacattagcgatgatgaaataaatgaaatgatcgaagatttaaaatccgattataatgtggagtctgatgaagacttagtcaacttctttacgaattccggctatccgcttgataatattgatcaattaaaagaagaactcattgtgcctgaaatcgccatgaagcaacttagcgcagaaggcgtagacacgtcagacgaaacccttcaaacttattttgaagaaaaccaagaacaatttgaacagattacagcgcgccatattcttgtagaagatgaagaaacagcaaatgaaatcaaagaccgcttaaacgatggcgaagactttgctgagttggccgaagaatattctacggacacgcaatcggctgccaatggcggcgaccttggtacctttgaccgagagcaaatggtgcctgaattttcagaggttgccttcagtttggacgtgaatgacattagtgatcctgtcgaatcgcagtttggcttccacatcattgaagtaacagataaactcgatacttttgaagacaaccgtgactttgtctacgaccaaatcatctccgagcaagggaaagattttactactgttttaggagagctgattgacaaatacaatgtgaaaattaacgacgaggaattcgatgccattgtcacccagtacacaacgccaatcgaagagcctgccgttgaggaagaacctgctgagggagagaacggagaagaagaacctgctgacgaggaaaacacagaggaagatgagtctgctgaagatacagaagcagatacctctaacgaaaacaacagcgaagatactgaagaataataaagaaagagcaagcaacagcgcaatgctgtcgcttgctcttatttctgctgtgcttccctgcgagctttggcggcctccaagcgggccatgtaaacatttccctcttgctcgatccactcctggtcagcctcgttttcttccttcattgtttttacccacatatatccgctaaacaaaatgccgataatcaaaccatacatccaccaggggctgctagttatgactgatagtagtgaagtttgagtcacaatgaagacaatcgctaagacggcaacagctcccagagcaatgaactggcttgtctttttaggtttcatcgtatcgtccatccttccacatccgttttggctttctagtaaaacgtatgcatgggaaaaatagaatagaaccgtagagaggatcaaagtcgacaaaaccatcgagactgatagaaaacgcttgtctgccgatgtcccaatccgtgtgaaaccgagaatagcgttcatgaatgacgggattccaagcatgggaacgaggggattaggtttaaccgttggaacctataactctattggctttttatgaaagctcggtttataaaaactgcggttatcaagagccataacccgttccgaaaactctcctggctgtacccgttcaagcgcccgatccatcatattaatcttcgcatcaatattatcaattaaatggagaacttccgcctccctcactacaggggtttttggactgccccattcccctttcccatggtgacttaaaataagatgctgaagaataagaacctcttccccgtcaatttctagctctttggcagcttgagcaatttcattggacatgatggaaatatggccaagaagctttccttctaacgtataggtagtatcaatcgcgccagatagctcacgaactttgcctaaatcgtgcaaaatgatgcctgcgtaaagcaagtctttgtcaagagttggataaagctctattaagcttttgccaatccgtagcatcgatacgacatggaatgccaagccggacataaactcatgatggttttttgtagccgctggcgattctaaaaatgcctgttggtgtttttttaggagaaagcgtgtaatccgttggatatggggattatggatttcaaaaatgtattgattgacttcatcgagcatatcatttggcgccaagggagctgatcggacaaaatcatttaagtgaacgccatccatcgctgatgttgggcggatgctggcaattttaagctgaagccgcccccgatagtcaatcacgtctccttggatatggacaattgttttattgacaaaggtcgcttcatcttctggggaaatcccccaaagtttagcctcaatttcaccggtatggtcgccaagaatcaacgtcaaaaaaggctttgagttgctagcgatttgttttgtggcggttttaattaataaataaccatctaccgcttcccccactcgatgatgtctaatgccttttgccatcgtctcacctcttaagcttctaatcttcctttcagtatagcatacgattcgctttaaaggggttgaaaacaaaaagagcgcacccataggctagcgctcttttttgtcagcttttgcttcttttcgccgttctttccgttttggttcaataggcttaggcttgattgtcttcggcaacgttatggtgaatcggacgccatcatcgatattttctactcgtgcactcccccgatgaagctccgctatttgcttgacgattgccagcccgagtccaaatttgcctttattgcctttataaaaagggttaaatagcttagtcaaatcagcgtcaatcggttctccttcattttcgacaatgagataacagttcctctcatcttgttcagcgcgaatatacaagcgatgcttcgcataacgcaacccgttttcaacgaggttttccaacaacacttcgcattgttcaatgtcagcttcgacaatgacttctgccccttcaacggaaatggttacatcatcgcgctggtagcggaaccgttcttcaatctggtatgctagctttccgaacgggaatggcccaacgttaagctgatctttcttcatttggtcgagctttgtgtaatagagcatgtcaattacgcggcgttccatccggtttgcctcttccgtgatgacgtccatcgtttgctccaaattttcttttggcaaaatcccatctttcacagactgggagtagcttttaatgaccataattggcgttttgagctcgtgggatgcatgttggatgaatgtcttttgcgctcggtcatagctatttaagttttgccgcatccgttcaaattggtaagataggcgttcgaaatccttatctccctcccaccgcaatggttcttgccaattacggttggcaatttgctcaagatggttctcaagcacggcaagaggctggcgcaaataatgctttagccaaatcgccgggaacaaacttaaggcacttgctaacaacaataagtatagcagccgctcccataaacggtttaccatctcgtcacggtatgtgtcccacatatacgtgacaaggaattgactgtccgagattttggtgattacataaaatagcgtttgttcatcaatggtggtttcataacggccatgctgtcccttttgttctaaagcattctggactatttcattattcacttcgtaagggggaactaaccgtgggtcaatatagcttacaccagcttcagataaacgaaatgaataagaaaccgttgaacgttgctccctggcctggtaaaaccctggctggaacggaaagtagtcattctccccagaaagaagctgcctaacatcgttttcaattaaacggtacgtttcctcggtaagcgttcctctgatcgaaagtgggtaaacaatggtaatcgaaaggacaacaagcacaattaacgaaacgaatgctagccatattcgtttcgtcaagttgattttaatcatgaagacaaaatgcggtatccgtaaccatagagcgtttctaagtggatacgcggcatttttttacggacgcggcggactacatcgtccactgcccgttctgaaccaaaataattttcgccccaaacatgctcaatgattttttcccgagaaaacgccttgccaatatcagcagacaacagcaacattaaatccatttcttttgtcgttaaatcaaccgtgtcattattggcctctagatcgacaatcgtgcggccgattgggtcaatgctgtagttgttcagctcaattttttgcgattctgctgacgacgtaccgtaaacacgattaagcagcttttttacacggataatcagttcctgtggcaaaaacggctttgccaaataatcatcgctgcccatctcaagaccaagcacacgatctaagtcttggtcacgtgcagaaatgaaaataactggcgtgtcttcttgctctttaatagctttcaaaacttggtagccgtcggtcccaggcaacataatatccaatacccacaaatgcggtttatccgggaccgcctcaatagcagcattgccgtcgagaaaaacggtgacgttccatccttccttttgcaaataagcctttaatacctctgataaattcgcttcatcttctactaggtaaatattatatgtttccatctgcaatcctcctaacagctccagtcaatttcatctacaatggtgtctaaaagcttgtcctctttaggttttcactttcagttacctgcccataaacaggaaatccataaccatttatcgacaccttcaagtggtatagctttattttacataatttcgttttaaatcgcgaactttccgctgaatttacgtaatcttcctcactctcaagaaatatgtaaaggcatgcccttagctggagcatgcctataacagagcaatagcagcaagggctgcaagcggtagcacccagcgacgccagccaaatggcctgacaccaaagccgtaaggcgggtagccatagtatggatagctatacggatagcgcatttccattgcgctagaaaatccttctaattgggacaagcgtattggtttttcattctcgtcaactggataaaggacatgggcattctcattgtcaacatattcaataatggcttcaagttcgacgccgtcatgtgccgtcaatttgacgggataattggtgtaccgctggcataatgacttaattgtttctactgacatccactattccccctttgccgatattgtattcactcatgaaaaataggtgaatgcacactttttttcatgctatactaatggaaacgctatcaaacaaaaggaggcgaaccaatggtttactatttgactgcttttcaaaaagacagttcagaagtgttaaatgaacggtttgaagcagcaacggacgatgaagcgatccgaacagccacattacggttaaaagaagcgcaggcggaaaagctcacccatcggttgacgagaagcggcaagctgctgttattctgccgatagaaaataccgcccttttcttaaaagagcggctaccgaatgttcccctattccaaacagtgaagatgcgaatcgatgagcatctgcgcaaaaaataacaatgcctgttgagcgatttctatcgtctgtaccctacgacagagatggaccctaatccacttgtagccgtagttgctttcggaacagttcatggaccataaaggcaaagccgtcttggtcaacattccgtgtgacccaggaggctttttcttttagttttccactggcattgcccatcgctaccccgaggcctgccatttctatcatgtcaatatcctcctcaccaatgccaatcgctacaacatcttccatctccatgcctcgctgtttcgtaagccattgcaatgcccgtgcttttccagcaccagcaccaacaaatatgcactctttcctgtttatgcggctcatttcaatgctttggatctctttctgtaacacttcgcaaatatggtccaagtctgtactgttttcacattttacggagatattaagcggcccgctcccttctttcagaacttgctcataaagggaatctacataagtggtcgggtacattaactgttcaccaggagaactgaatgacattcgtgcaagcaagttttgtttttgcaagggccgagtcgccacagcgtggtcgccatataataggcgggcatcacagtcgaaacgttcaaggatatggcagaaatcaagtgttgtatccatttcgagctggcgattaaaccattcatttctatctgtatctgccacaagcgctcctccatgagcgattaccatgccatcaagctttaatgcttttgcagccttttgtgcccgtgaaaaaggctgtgatgtcgtcaggacaactgtgatccctttatactttaaataattgatcgcctctttcgtcctcctgcttatcttcgaatctttgccaaaaatggctccatcaatattgaccgccagcagtttataggccttcacatccattcccccttcaattctcttgatgtactgtgaacttgcctcattctgtactagtattatgatgacgaggaaaaaagtagaactggctgtttgccgcttgcggaccggccataaaaaaacgacctgccttgttcggcagatcgtaaaaaacttattgctcttgtggcggttcgccctaaatgcgctcaagtggctcggtaatgattttgttcaagtctgtaataatcacacttaaccgttgctccgcatccatcaattttgaaatcaattcatgctgggaaacgagttcaaattgctgctgtgcttgttgcgcttcttcttcgctaatttgcacgccttgcatttgcttttgctgcaaatcgagctgaagcttccggaaattttcaagcatttttttagcgatgtcgtccgcatcaatttgccgatgcaagtcgtaaagcgacttaaattcttgcgtttctgctaacgcttcttttagctcgtgcgctttatcatacgcattgctcattcattatcactcctaaaggctagtctcaccgactataacatgaagtcgaccgtaaatcacgccatatgggccaattaatagaaaaaatgtacgataacggcttgaatgaggccgacgattccgccaatcaagccgccgagaagggtaatcatatgcaattcccgtctcgtaatgttcattattaatttttctaaatgcgccattgagaacgaggctacttgctcttcaatcacttcctccagacggagcttgctaaggatatcggcaatatgttgttccatgtaaaccgttaccatgccgacaatgacagggacaccccgttcaacgagtggttctgcatatggcgttgtccatgtacttaaaggcgcgttataccaatttaaaacaggtatctttccttcaagctcttctgcagctttatcaacaaactgatcgacatagttctctgcctgaaaagaagcaagcggtctgttgagcatacggtgccactccgtttgaagcaagctttgcaccgtttcctttgtctgttcatcatgaaggaattttttaatttcaggcaacacatattccgtcaacttatcagcagaaaaaaacatggataccatgctgccgacttttccttttgtcgtcaaaaactgtctcaccattgcaccaatccgctgctcgccttcttcactgtcaatataagctgttgcccgttttaacaacaaggctgacgcctctggaagccagtccgttaaacgatcctgcaattcttgtgggacgacgcttttaataggcacttccttgtttttttgtaaatagcgtttgaggcggtccttcagccatgatttcgattggacgacaagctgttcacggccaatatctgcctgaaacagcggctttaaaatcgactcaacggttcgttcgctcctaagccagctcgcaagctgtttttttagccaattggttagttcagctgcaaaagcggtactgccaaattttttgccgagcccctcagctgtaagcaaatgattggcgacaatattgccaagctggacggcaagttctttttgtcgccgaggcagtaagccaggtgtaaagggaagttgccatttgccaattgagtatgcccgatgggggcggaataacatgcggattgcaagggcgtttgtcgccgcacctacaatagcgccgacgacggcgagtaaaagtactaaccatatccagtgcacagtcatatgcctgctttctaaagccagcaggcttcctcctttttccaggaatgcggacctaaatccattgttctattatagctgattttttttgatcatgaaatgccacctatggtacactctatgtaagcccttacataaaaatggaggtgttttctgtgcttgtccatttccaatacaagcctctttctgtccacggccgtaaacaaaaatggagtttttcttgctattttgaagggcgctttgtcgctggcacgtaccactatgacggctcaattttgtggcaaaacgcccctcatgacataaataaacagttgcaattagaaaaatcgatccatgatttaatgctttaccatgtgtatgaagcagaacagcatatttaatcattttgactcttttggtgcatgttaataccaggagggatgatgatgccaaacaaagaaaaacgggactctgaggcgcgggcaaaatttgaactggacgtggaccgatatgtgaatgaaggtttacatggaggaaccgttaacccccgctcaggcggacggattgaagaagatgtcccccaagaaaaacaaagcaagcgctcttagttttttctagtccaacaaacacaaaccgcagccagcagcgctggcggtaagggaagagacgtttagaagcgtgaaaagaagcctccgagaggcttcttttttgttatactagcctaaaaagacctggaaaggtacgtgaacgatgatcactgaactaaaaacacaatttgcccatgccttatggaaaccaggggacaacctgtcggatcgttgggcgctgcaatcagaaagccgtgatacggtttcttttaaccgccaaaagctaacagacagagagcagctattgttgtctttgcttttaagtgaacctctgtctcctcctgctccacaaacaaaagaagaaaacgcatggcacgcttatttgttcggcgacgggcaacagccgccaacagaagaaaccatttgcgctgttcattttcaattggaaaagcctcttgaagactttgccgcttttcgtgaagcggttcttaatacatttcctccctatacttgtttcgtatggcaaaacagcatgtccggcatgttgttgttcccttcggccgcagaggatgttgatttagatgcagttgtcgaattgattgaaacagacttttacatcggcatctcgttcatggtcggcacaccagtggaaggaccaaaagcaaaggcggcatggcgatttgaaagcgagttgtttgcttgctgtaaagacgatcaaaccaaaaagaagcgccacgtattgcaagcagcggaagctggtttagcttacttactaaagcaaaccccttcgctcgagctcgaaaagctgcgcgtccattttcttcctcaggaaattgttgacgacaaagagctggtaagaacggtacgcgtatacttactggaaaatatgaatagcacaaaagcggctaaaaccctccatttgcaccgcaatagcttgcaatacagaatcgacaagtttgttgccgtcactggaattgatatacgcacttttccaaacgccgcctttgttgctttgctgcttccataacccgcggcatgctgcacaggttgaccgttattttttgtgcactttttccatagcgccatcattatgaaaggggttacaatacaaacaataactaaggaggggaaacgacaaatggcttcgattcaattaaaaaatgtgtataaagtatatgatggggatgttacggctgttacagacttcaacttagacattgaagacaaggagtttattgttttcgtcggcccatcaggctgtggtaaatccactacattgcggatgatcgctgggcttgaagagatttcccaaggcgaccttatcattggcgataaacgaatgaatgatgtcgctccaaaagaccgggatattgcgatggttttccaaaactacgcattgtatccacatatgaacgtatatgataatatggcattcgggcttaaactgcgcaaatttaaaaaagaagaaattaaaacccgcgtacataatgcggcgaaaatccttggccttgaagaaatgcttgaccggaaaccaaaagcaatgtccggcgggcaacgtcaacgtgttgctcttggacgggcgatcgtccgtgatccgcaagtgtttttaatggacgaaccactgtccaacttggacgcgaagcttcgtgtgcaaatgcgtgctgagattacaaaattgcataagcgcttacaaacaacgacgatttatgtaacccatgaccaaacagaagcgatgacgatggcgacacggatcgttatcatgaaagatggctttatccaacaaatcggcacaccgaaagatgtgtacgacaatccggaaaatattttcgtcggcggttttatcggctctccatctatgaactttatttcaggccatttagatggaagcgatttcgtagtcaaagagcagcgcatacgcgtcccagaagggaaaatgtctatcttacgggaacaaggctttcaagataaagaactgattctcggcatacgccctgaggatattcatgatgagcccgtattcatttcttcctcaccagacacgaaaatcaatgcgttgatcgatgtagcggaattgactggtgctgaaatggtgctttactcatcgattgacggccaagaattcgtcgctcgtgttgattcacggacaacagcgaaaagcggcgatacgattgagcttgcttttaatatgaataaagcacacttctttaacccagaaaacgaacaacgcattcgctaaaacgtttccacttctcatcataaaaagtcactaagcggccttgcctctgtacgtaacaggggaaggcctctttttgctacataatgactgcttcccttcaagcatgctcgcttccactataaatcctcttttcttgaaggccgtcccattgcttaaaacttttttatcaatgaccaacagtttcgttcattgaaacgttctctttatgagagggaaacattgaatctcgattgaatgtacaatgaacggaggacagatgcagaataggtaggtgacatattggcgacatttgaagatttacatggagatttacggcgcttcgcttattcaattgcccgccatgaacacgaagccaatgacttgcttcaagacgcgttcgagaaagcactggtacacagcgaacttgaacagtggccgcgccataaacaaaaggcatggttttatcgagtgatgaaaaacgagctaattgaccagcgccgcaagctccaacgagaaacggagtgggaagaagcaaacgaaccagcctttcaagctgctggcctaacagcgattgaaacagcggacttgcttcgctccctctcccctattcaaagtgatattgttttcaaacgctattggatcgggctttccagcaacgaaattagcgaacaaaccgcgttaacggcatcaaccgtacgctaccatttagcgcaagcaatcaagacgctgcgcaaacaattagaggaggatgaatgaaatgggaatgacgattggaaatgtcggattgttaaacatggtgaatgctaccgaagagagcattcgcgatattgaaaaaatcgaaaatgtcggacttgtaatctacgcaaaagagacagcgcctctcctttcaaaattaactatcaacaacatcggccagacattggaaactagttatcaagcacgcatcgtcaacggtcgtttgctcattgattccgcctttttggaggcgatgctcgaaccatgtacctttctagtgaacggcctggttatagtcgcaaaggatgtgacggtcgagcagctcaaacaggcagtctgccaaatcgttgtgcacggtagcgtttatgctcctcccgctctaaaaggggccgtcaaccttctgttaaaaacggtctctggttccgttgaaacgtacacagaccacttgcctcaaattgaaaccactagcattcaattgaccaatagctacctaaaggcacttccacctggccaacttcttatcgtcaatggcaagctcgaattggcgcctgatcttgacatggccttgttttcagacagaattgcacgtctcaccattaacggaaaggcgcttctgtatgccacacaagaacagggtttttacgagaaggcttctattgtgggcaaagtggcgattgttccctctggttttcaagtaacgacggggacactgcgcttagatgaacattcgattaaacggtttaggggcagctcgctttacaccaccaagccgttgctgttacaaaagggcatttccagagaacaattgcaggcagctttcaccgctattcactcaacttcctacattgtctgccatgaggaaattgaagacttagtgtacgaacgcttggatcgatttgaaacagacgttctttcctattctggtgcctttcgtttcattgaaaaagagaactggcaacaagaagacgttgagtggttggaagcaaatacgacgattgttgtcgacgacacattaaccattacagaaaaaatagccgagaacgttctaaacgaaaaaattggcacacttgatttatttggctcagtctacacagctgacgctgcccaaaaagcattgctgcaaagcaaactgcggacacctgaaggaatcctcgttgaccaatccaatcaaagtgcgaaaaatcgcatgggaaacattggagaacttaccctttaaaacaaggtaaaatcgataggcttttaattcacaagcgtaggcaagcagccccctcccctgcactctttatttaaaagaagcaggggttcgtttcacccacgtgttacacaagtgagagccttttgtgcggagaaacgttcaatcggattcgtcatgaaaagcaagcctggaaaaaccaagtgaaaatagctggcaacgacgaaaaggaaggagacgcataccgttactagaaaggaggccgcaaaaacaatgacattttcattcctttttttcacgattaccattaaaaagcgcaagcacttagactattcacaagccgaactggaagcgtttatccatgacgaaaacattgaaaagcacttagaagcgatcaaaacgcgttattggcaccacctttaattgaacgagtaaaagagacgaaatgacgcctactgctgtaacgtgcccgtcctctaaatacctctgtccgtatacgagaagaagcgattgtttcgtgatcatcgatccatacgaaaaaggcccataagaccgtcactggccttatcgggcacaaggggatttattattgttcaagcgctccgtcttaaacgggataaacaggatgttttcgttcgctaaacaccatccgcttgctttcataaaaagcaaagcgctgccccaattcttgtcgtaagtcattgccgttgacaaccccgtcgatgactagctctgaagcaaggcgataaacatcgatatctcgtttatatgcttcacgtttttcctctataaatgctttccgctcctgttccccaagttcagcaattttgtttgcatatacggcgttgaccgcagcttctggccccatcaccgcaatttgtgcttgcggaagggcaaggcaacaatctgggtcaaaagcaggcccggccattgcatacagtccggccccgtatgcttttcgaacgatgacggaaattttcggtacagtcgcttcagccatagcggcaatcatttttgcgccatggcgaataatgccagcacgttcgactttggtgccgatcataaaacctggaatgtccgctaaaaacaaaagcggcagatgaaaagcatcacaaagagtaatgaaccgagcggctttgtcagctgagtctggaaacaatactccgccttttgcctttggttgattggcgacaatgccgatcgcctgcccgtttaaccgggcaaagccagtgatgagttctggagcaaagtttcgcttgatttcaaaaaaactgtcgttgtcgacaaggcgctcgagcaagtcatacatattaaaaggtgcattttgattttgcgggatcaagtcttcgattgtttttggcacatctttcggcgggcgcgcctctttactaggcggcttctctttatagcttggcggcaaataacttaaataagcacgcgcctgggaaatcgcgtcttcctcgtttttggctagaatatcaccacagcctgacacactacagtgcatgctggcgccgcccatttcttcaagtgtgacatcctcgccaataaccatttgcgccatccgcggcgaacctaaatacatggaagcatttccgtccaccataataacaacatcgcaaaatgcaggaatgtacgcgccgcccgccgctgaaggaccaaaaagaatacaaacttgcggaattcttcctgacagttttacttgattgctaaaaatacggcctgcccctcgccgccctggaaacatctcaacttggtcagtaattcttgcaccagccgagtcaaccaaatacaacagcggcacggacaatttttctgccgtttcttgaatacggatgattttttcaaccgttcgcgctccccaagaacctgccttaacggtcgaatcattcgccatcacacaaacaggcttgccgtctatcgtacccattccgcaaatgactccgtctgctggcagaccgtccgcttcacagttagcaaacaagccgtcttcagtagtcaagccgtcatcaagcaacaactgcaaacgctccctggcaaacaatttgcctttcttcgcattttgttgatggtatttcgtatggccgcctttaaaaatttccgtttccttcgccaatttggtttgctcaaatgtcatctcgctctcaactcctatttgcctttgtaaacgggagggcgcttttctttgaatgaagcaagcccttctaaacgatcttcggtttgcaatgtctgcaaatatgcttcgcgttccacagccaaagcggcttcaagaggaagggctgccccttcgttgattgccttttttgctgcttgcaacgcaatcgggccgttgctcgccatctcgaccgccaactgtgaagcagctgcggatgttttttctcgaggcagtgcccattcgcacaaaccgtatttacgggcttctgttccagttaaacgccttgccgtgaaaatgagttcctttgcctttcctgggccaattaaacgaggcagccgctgcgtccccccagctcctggaataatcgccaatttggtttcggtcaaaccataaaaactgtcttcggcaaaaatgcggacatcgcaagcaagacacagttccaacccaccgccaaaggcactgccccctacgtcggcaatgacgggctgtggaagcttttccacccgtgcaatcacctcacctatccgcttgaccgcataaatggcctcgctttctgtcatgtttgcccgttcttttaagtcagcgccggcacaaaacgctttttcgcctgcgccagctaaaataacaacacggatgttgtgctcttgtgcaacccagtcgcaagccgcttcgagctcatctaaaagcgcaagcgagagcgcattggctgcttgtggacggtttaacgtaatacgggcaattccatcgtgagctgctgtctgcacaagcgttttactcgagctcaatcaaaacgtccccttcgttgacaaactccccttctggcttgacgatcgccttgactttccctgcgcgttctgcctcaattggaatctccattttcattgattctaaaatggcgacttcatctccagccttcacttcgtcgccttcttttacagtaactttccaaacgttccctgccattgtcgctgtaatatggttcatgcttctctctcctttatgaaaagttcttctttataatcatttataaaagatgtaggcgtgttgccttcaataaaagcttggtgatcgcatattgcccgcaaaagaggcagattggtttttacccctgttatgtcatagtcattgagcgcttcctttaatcgagtaatcgcttcaatgcgcgtgccccctttaacaatgagcttagcgatcatcggatcataaaacggggtaatcacgcttcctgctttcaccggacattcatggcggataaaaggttgtttcggaagagagatgtcctttatcatcccaggcgaagggaaaaagcgtattgggtcttctgcataaatgcggacttcgatcgcatggccgctgcctctgagctcatgctgctgccacggcagcacatcgccatttgctatccgcaattgccattccacaagatcaatgccaaagacttcctctgtcactggatgttcgacttgcagccgtgtattcatttccaaaaagtaataatttccgtcgctgtctagcaaacattcaattgtaccagcattttcataaccaatggcggcagctgcttttttcgccatttcctccatcgcctcacgagtcgtttggtctaaaaaaggagatggcgcttcttcaacaactttttgatgtctcctttgaatggaacattcccgctccccaaatgcgaggatatggccatcgctgtcagcgagcacttgaatttcaatgtgacgcggccgctcaagcaacttctccaaataaagagagctgtcgccaaaaaacatacgtgctttcttttcgtttcgggcaaaagctgcttcgatttcctcttcattccggcacacgtcaatgccgatgccgccgccacctgaagcggctttgaccataaccggaaagccaatttcccttgctttcgtctttgcttctgctgctgaggcaagagcgctacttcctggaataacagggatgcccgctgcctccatcgtctttctagcttgcaatttatcgcccatcagcgcaattgccgttgctgaagggccaataaaggttagcccattgtccttacaggcggtcgcaaatgaagcttgctcggacaacagcccgtaaccgggatgaatggcatcagtttttgcttgtttggcaacagccaaaatctgttcttggtttaaatagctctccgggacacgtgaaccgccaatgcagtaggcctcgtcggcaagcgtgacgtgttctgcattgcaatcagcttctgaataaacagcgatagtctttacgccaagctttttgcatgtacggataatgcgcgaggcaatttcgccacggttggcaattaatactgtattgatcaccgtttcgcctccttttgctgtaaagctgctaaccctaaatgcctagcaatgacaaggcgttggatttccgaagtgccttcgccaatttccaatagcttggcatcacggagcatccgttctacttcatattcgcgcatatagccatagccgccatgaatttgcaaggcctggttgcatgtgcgtgttgccatttcagaagcgaacagtttggcataggccgcttctttgccaaacggtgctcctgcatcctttaaagcagctgccttgtgcaccatattacgagcaagttcaatttccatcgccatatcggctagcttaaattgaatcgcttggaatgagccgatcggcttcgaaaattgttttcgttctttcgcataggctaacgcccggtcaaaggccgcttgggcaatgccgactgcaagggctgcaattgaaattcgcccaccatccaacgtgtaaaggaattgactgaagccttttccaggatcgccgagcaaattgctttcagggacacggacatcttcaaggacaagttcacatgtgtttgaagcgcggacacccattttgtcgtaaggagccgtaatcgtaaaaccaggtgtatctgttggtacaataaacgctgaaatccgttttttgccgtttgattgcgttccggtaacggcagtaatgataacggtttgcgcgtacatcgcattcgtgatccaacatttctcaccattaagaatatagtcgccgttttcaaagacagcttttgtctgcgtcccacccgcgtcagaaccagcatttggttctgttaacccgaatgcaccaagggattcgccttttgcaagtggaactaaataggtttgcttttgttcttctgtgccgtagtagaaaatcggacttgcaccaagagataccgctgcagcataactcaagccggtaccgccgcatgcgtagccgatttcttcgacagcaagtgcataagagaccgtatctcctcctgacccgccgtatttttcggggaacggcaaaccgagcaagccaagctgccccatctttttaaaaatcgtctctggaaaacgcgaatctcgatctagctctcgcgccagtggggcaatttccttgcgggcaaattgcctaaccatgtctttaatcatttcttggtcttttgtcagtctgactgtcatggcatgctctccttcttttcataatctgagcgaccgttcaggaaaagccaacttttagaaatgaaagcgttaccaaaatcgtaacgtactctttttcgtaagtcaaatcctttctgtttatcctatttgccccatccagtggctatgctgttcttttcacgccatccatgctagactttttttatgaaaaacgaaacttcgacttttgctgtccgtaaatggtattaaaagaaaggtggtacatagagatgattattcttatcattgtcatcattgctgttattgggcttgcttggattgctagctacaactcactcgtcaagcaccgaaattgggccgaggaatcgtgggcacaaattgatgtgcagttaaagcgacgctatgatttaattccaaatctcgttgaaaccgtaaaaggctacgccaaacatgaacaggaaacgttgactggcgtcattgaaaaacgaaacgtcattgcccagccgaatgcgagccgccacgaacgtgtcgagcaaaatgctgagctaaacggcatgcttaggcaattatttgcccttggggaatcgtatcccgatttaaaagcgaacaaaaactttttgcagcttcaggaagagcttgctggaacagaaaataaaattgcgtacgcccgtcaagcttataattcaactgtgatgcgctataatactaagctggagtcgtttccatccaatctgattgctaatattcattcttttatgcgcatggaactccttgacattcctgatgaggaaaaagaaccggtaaaagtgcaattttaaggaggggagccattgtttcatatccagattgcccgcaataaacgaaagacggtttttttggtcgccctctttattgtttttgttctcttgatcggcgccgctattacgtacgtgcgtgccggcgattacgtaagcggcgctatttttgccgcggtcatcgccggaggctatacgatttttatgatttccacaagcaccaatgttgtcatgcgcatgaaccacgcccgtgagatcacttcatcaacggaacagccgtttttatggcacaccgtcgagggattagccattgcagcgcggatcccgatgccgcgaatttttattattcaagacaaaagcccgaatgcctttgcaacagggatttcgccaaaatcaggcgctgtagccgtcacttccggattgatggagcgcctctcccgcgaagaaattgaaggtgtgcttgctcatgaagtggcccatattcgcaattatgatatacgcttatctaccattgccgtcgctctcgtatcggcaatcgccatattgagcgatctcggcatgcgttttttcgtattttctggaggacgtaataaagacaacaagcatccgcttattctcatcattgcgattttcctcgtcttgctttcgccgcttgtggccacgatgatgcagcttgccatttcccgcaaccgcgagtatttggctgatgcgagtgcagttgagttgacccgcaaccctgtagcgttagcaagcgcactggaaactattacgaatacgcgtattcctgtggaagaagcatcgtcttcaaccgcatcgctatactttgcggacccgttaaaaaagaaagccgcttcgttattttcaacccatccgccgccagaagaacggataaaacgattgcggaatatgtgaacgatcttcagattgatagaaaacgcttgtcagccgaaatgaacaacgaaggatgcgagcatttaccaaaagaaagacagcctcgtctaagacgaggctgtcttttgctaagcgattagttagttcaatagcaatgactgctctttcgcttcttcaaaaatgccgagcataatgcccatacctttttcaatttctgcatcagttgcatgagtgaagttaaggcgcagtgtatttaattgcggggctcctgcataaaatggccgtcctggtacataggccattcccttttctacagcgcgtggcagcaaagcttctgtattaatgtgcggttctgcctctacccataggaacatgccgccttctggttcgataaactgaatcgagccgcgctctttcgcctctttcaaacaatcaaccatgacattcttccggtgtccgtacaactcactaatgttatgaatatgaccatcaaaatcgaagtcgcggcatagatggtaaagtgcctgatggccaatcgagttggagtgcaagtcattggcttgtttcgcttgcgccatcatgcggataatttggtatgggcccgttatccaacccgtccgcaaagcaggaacggccgttttggaaaacgtactcgtatacaacacatgggagccatcatcaagagccgcaattggcgtatagcctcctggagtaaattggatgtcgccgtatggatcgtcttcaaaaataagaacatggtgcttacgcgctaagcccactagttctttgcgccgctcaagcgtccaaacacggcctgtcgggtttgaaaatgttggaaccacataaatgactttaggcttatattcttttatttttcgaactaaatcgtccatcatcattccgtctgcatcacatttaacaggaataattgtcgcttcgtacgactgaaaaacttgcaatgcagctaaataagttggctcttccgtaaaaatgacgtcccctggtccgatcatcacgcgggaaaataaatcgattgcctgctgcgaaccagtcgttaataacatctcatcagcggttaagcctgttatgccttttttctccatccgttcgagaatgacttcgcgcaaaggcagatacccctctgtttctccgtattgcaatgccttatttccacttgcaaacacgcggctaaatgcttcttcaatcgcctttagcggaaataagccatcatctggcaagcctcctgcaaaggaaatgacgtccccccggttcaccacttttaatatgtctcgtacagctgatgacttcaaatggcgaaccctttgtgcaaatgcatatttcatctctaacaccccggtatctcttaatctttttctctttttttcgtccactcaccaaaaaatctgattaattgaatgacttctattctactcctcttttgacgaaaaagtcaatcaatttatccgttgaaaaaaagctttcctccggcaaagaaggaaagcttcttttttaatccttgattgcagcatattgcgacttgacgaggccaaaataggtccctttcttttccatcagttggtcatgggtaccttgttcaatcacattgccatgttcaaggacaatgatgttgtcggcatcgcgaatcgttgaaaggcgatgggcaatcatgatcgccgttctacctgccaacagctttttaagcccgttttggattttcacttcggtttctgtatcgatgctggcggtagcctcatccaaaattaaaatacgcggatcggcaattaacgcccgggcaaaggaaagaagttgccgttcccctacagatagcacattcccttgttcttcgacttcagtttggtagccttgttccaacttttcgataaaggaatgggctccgattgcttgagctgctgctatgatttcttcgtctgtggctgaaggattgccaaaacgaatgttatccatgattgtgcctgcgaaaataaacgtgtcttggaggacataactgacatgtttgcgcagatcggcaaggcgaatgtcttttaaatcaacgccatctaagtgaatctccccggaagttggatcataaaaacggctcatcaagttgacaatcgttgacttgccagaaccagtatggccgacaagagccactgtcgtgccagcatgaaaggtaagatcaacgccgtttaatgcccgacgtttgccgtcgtaagaaaactccacttctttaaagacgatttctccttttatgtctgtaagcggctgtgcatctggcttatcttccacattcggcttttcatcgagaaattcaaaaatccgctcgctcgaagccatgccgacaagaagctggttgtacacttgccctaaacgggaaattggttcccaaaacatgccgatgtaaaaagcaaaagatacaaacacgcctaattctaatgtactcgcatcactttggattaaaaacgcgccataccaaattaatatcgctcctccaagtgcacttgccatttcaacaaatggtcggaacaatgcgttcatccgtgtagcctggcgccagctctcgtagttttggctgttcacttcgtcaaagaaatccatgttttcatgttcttgggcataggcttgtgtcacgcgaataccttgaatgctctcattcaaatgggaattcagcctagattggcgcaaacgcacggtttgccaagcacggcgaatttgccggcgcagtttcgttgaaataaaaaacataatcggcaaaacgatgagaatgacaaccgcaagttctgggctgagcgagaataaaatcaccacaatcccaacaagcatgaccgcatccatcaataaattaataacgccgtttgtaaacaaatcttggagagaattcacatcattgattactcttacaagaatcgagccagctgaacgctggtcataaaatcgatgggacaaatgctggatatggtcaaacagctttttgcgaatgtcaaaaataacgtgctggccaagctggttcgtccagcggatgcggaataaattggccacataggcgaatagatacaagcctaaaacaatgcctgcataaagcaccatatcggcggtggtcgctaaccctttttccagcctgtcgacagcgaatacaccgataaatattgggataatcagccgcactgccgtcgccaggagcataacaaaaatcgtttttggcaacaggctttttgcgtaaggcgccaaaaacgaaaatagacgcgtcatttgtttccagttaaagggcttttcaataatttcctcagttgaatagtgaaaacgagttttccttcttgcctgttccatgcctggtcacatccttacgcttgttgcagcacatattgttgatcttggttttggatatcgtaaatccgtctgtatagcccttcttcctgtagaaggctttcgtggtctccgtcttgaacaatgctcccgtcttcaagaacgagaatcttgtcacaatgctttacagatgatatccgatgggcaatgacaaacgttgttcgcccctccattatttcttttagcgcttgctggattttcatttctgtttgcatatcaacagcgcttgtcgcatcgtctagaataagaatgctcgggtttaaaatcatcgccctggcaatggcaattcgctgcttttgccctccagaaagaccgaggccccgttcgccgagaatcgtgtcgtatccgtctggaagcgagctgataaagtcatgtgcatcggcacgcttagccgccgctacgatttcttccatcggaacatcagggtttccataggcaaggttgtcacggatagaagaagagaacaaaaacgtttgttgaagcacgaggccgatattgctcctcagttccttcacatcatattcttctaccggtttgccatcaatgaaaatgtcacccgctgttttttcataaaagcgcatgataagctggataatgcttgattttcctgagcctgttgcaccgacaagcccgattgtcgaccctttaggtgcatggaaagagatatcggtgagcgcatttttggctttgttgttatagcgtaactcgacgtttttaaaaaccacatcgccctcaagcttcgtatatgagcttgtttgctctactccgtttttccgctcctcttcatccaatatttcaagcaaacgttcacctgacgcttttgactgtgaaaacgtgttgataataaatccaaggttcataatgggaccaattatgaaccatacaaggctaaagaaagccgttaattcgccggccgtcaattggccttgtaccgctaaataaccgccaaaaccaagaagaagcacagcagacgtgttgccgatgaattccattaacggaaaatacgttccccatacattagcgacttctacgttttttgcacgataatcgtcattttgtttatggaaacggtttttttctgtgtcttcctgggcaagggctttgaccgtatgcatgccgcttacattctcttgcacttttgtgttgagcgaagctagtgatttacggacacgccgaaatcccggatgtacccgtttatcaaacttgtaaacaacgacacttaaaaacggcaatgtcaccattgtcacaattgttaaaggcaccgaatagtaaaacataacgatcagcgaaaagccgacaagcaggacaaagttgacaagctgagcgcagccaaacgaaagaaaaaagcggaatgcttccacgtccgctgttagccttgacatcaaatcgccggttttagcattgtcgtaataagtaaatggaaggaattgcagttttttataaagcgctttccgaagacgataaacagcccgtacgccaaataaatcaccaaaatattggttgatgtacgtggcaattccttttactgccatgattaaaattaaaccgatcgccaagtaagggataatgccgtattctccgccgctaataccaacatcaatggcgatttgcaaaacaaccggataaacaaccgtaattgctgtcacaaaaaacaatgcgatcaaagaaaacacaaaaaaccttttatctggaagataaaacgttgccagacgcctaaaagtctccaccgttacaccacctcttaaagtcaatgcttagaattacgaaataccgtagagtcgtaaaatctatcttactctgaaacgaaacgaccgtcaattaatatatcgatcattttgaaatttttttgtatgcctatgtaacgtaaagacattcgctcacgttgcacaaaaaaagggctatctgctgcccctataaatacttgcggtgcattttgccgccgtcgtaaataaaaacaatctgtttttcattaatttctgtttccaaatgaacggtgcggccccatagttgataaagataaggaaggactctctctaaatggccaacatcaagttcaattccttcaaaacgatgggtaatatacagctccccattttttaagtaatcgccatccgttactaccaggtacggaaagccgccattgacccgcgatttagtaatgtggtcacgtacaccttcccaagctttgtcgacaaccttatagtcggaaccttgtttttggaataagtacatgtcttcccggtggacgagctcttttgttaaatagttgcggataaaggacgtatccgattcaatttcacggacttcaaagattttctctcgcccgctccctggcttaatcccttgtttgcgctgcatttcctctgttggctcgttgtagcgttgttcaatatcctcaaaaattttcaaccctaagtaataaggattaatggacgttttcgatggctggacaacagcagcgttcaacttcgcaaattcaacggcctcttcgctcgttaaatccatttctctaatgatccgtgcatgccaaaaagaggcccagccttcattcatgattttcgtttccaattgtggccaaaaataaagcatctcttcgcgcatcattgtcaaaatatcacgttgccaaggttccaattccctgctatggtgttcgataaaacgaagcacatctttttcagggctttcaggaaaacgtttcttttttggagccgcttcctttttcggttgctcttctaaattccacaaatcctcgtattcagaagctcgtggcttttcaaatgtcaattcgctgctctccactggcttgacaagcccaggatcaatatgctcttgaatcgccaaaacagcatcaagaaaattttcaacttgctctttgccatgaatatgttcatagtgggcaacccgttcggcggttgcgctcatgctctctaccatatcgcgccgtgtattggaaaagcgaatgttgtttttaaaaaagtcacaatgggccaacacatgggccacaataagcttgttttggatcaaactattgctgtctaacaaaaaggcatagcatggatcagaattaatcacgagctcataaattttgcttaaccctaaatcatactgaagtttcattttgtggtattgcttgccaaacgaccaatggttataccgtgttggcatcccataagcaccaaatgtgtaaatgatatccgctgggcaaatttcatagcgcatttcataaaaatcaaggccaaatcctttagcaatttcagtaatttcttcaatcgcatactgcagttctttccgattgtcagacaacgcgctccctccttcgttgtcttcctattctatgaacagcagcgggggaacatgaacgaagaaaaaacccttggcgtacagcaagcctgtacgcaagggcaatgttaagaaataaaagcttccatataagacatgaccgcttgttgcaactgagtcagtttttgttcgctctcttcattgctagagccgacaacaccaaaataaaacttcactttaggttctgttccagaaggacgcacacagaaccacgaaccgtcctcaagtgtgtacttcagtacattcgatgctggcaactcaatcgctgtccgttctccggttgctgtggcaagcgcttgtctcgattcaaaatcttcgactgttgtaatgagcttgctagccatatgtgtaggcgcttcttgacggagagaggcaagaatagaagcaattttttctgccccttcttttccttttaacgttaatgattgcaacccttcacggtaatagccgtacttgcgataaacttgctgcattgcttcataaaccgtcatgcctttacgcttataatggagtgccaactcagcagcaaacaggcaagcttgtatagcatctttatcgcggacgaaatcacctattaaatagccatagctttcttcatagccgaacaaaaatgtatgttcaccagaacgttcatattcgcccatcttttcgccgataaacttgaagcctgttaatgtatcgatggttgtcagcccgtaagcatcagcaactgctcggcctagttcagacgtgacaatcgtcttgagcactatgccattttgcggaagcgtccccttttgctggcgtgtttcgagaagatagtcaagcaagagcgcgccagtttggtttccagtcaagacaacgtagtttccctcgtcatctttcactgcaagccctactcggtctgcatccgggtctgtagcaagcaaaagatctgcctcttggcgctccccatagtccatcgccaatgtaaaagctgcatgttcctctgggttgggtgaagaaacagttgaaaaatcaggatcaggttgctcttgttcagccaccactgtaacgtttgtaaacccgctttcttttaaggcgcgcctaaccgcaacattcgctgtgccatggagcggtgtaaacacaatggccaactcatcgccatactgcttgtccatttcaggctgaagcaaaatcgtcttcaattgttcgttataagcatcgtcaatttcagtggagatgagctcgtataactgtgctgctttcaattcctcttcatcgccaacttcaatagccaattcatcttcgattgattgcacacaagcaacaagctcttctgcaggggcaggcgggaattggcagccatctgagccgtatactttaaatccattatattcaggcgggttatgagaagcggtaatgacaatgcccgcttcagccccgagataacggacggcaaacgacaattctggcgttggccgcaaactttcgaaaacgtacgctttaatgccatgagcgcctaacgtgattgctgcttcatgggcaaactttgccgacttatggcgggaatcaaaagcgatcgccactcctttgcttttcgccgtctcgcctcgtttttcaataaagcgggccagtccttcggctgcttttcgaacagtatatgtattcatccggtttggtcctggcccaatttcccctcgcatgcctcctgtcccaaaggcaagttcccggtaaaaacaatcttcaagcgccttatcattatccaaaatggcgtccaattgttgacgcacatctggttctaattgtgcaaattggttccagcgttccactttctccacaatattcaaaagagtccctcccataaaaactgctctacgctatcattttacacagcattccactggtttgccagcaaaaaacggcttacctgcttgcaggcttgatcaaggcatccaattccactcggtattgcgcttcctgctcttcgctccaattaaagcgatcacgcatgtagcgaaaaaccgcttcctggacatgtaacgcttctgttttattaaagtagaacatcgccgtgcgcctgactaaaaagtctgcgggcgtaaccgccatttcttcttcaatcgaaaacagcagctgtgcaaaaataaccggcggcaacccaaatagacgtgcttgttttttataagaccaaaagcgtgcataaatggcccctacattcgaaccatacatatcgactaattcttgtgccttttcttggctgattccatactgcaccccttcagcgaggcgcttttctttataattgtcaaattggtcaacgctgcctgcatagccgccagaaagggtgactgtatccgtttcgcacggagaaaaagggcctgcttttttggcgatacggtcaagaatttgctgggccaataaacgataaccagtggtgtgtccacatacgactgttacaaggccagaagcggattcaaaccagtcatttttcctgatcgcttcatgcttttttttatttgtttcaatcacaattggccgtttaacatgccatgaggcttcaatatcatcaggtgtaatctgtacttcctgaaacgtctgattgattttcgccaacatgacctctcgttcgtttttgtccttttcatcgctgtccgtcaaagacaatacgactttcttgccccttggcgccagactaatcagctttttgtcgtccaattccaaataaacaacttggtcaatcgcaagcagctcttttggaatgaccatataaacatcagtcatatagccaatcgtcttggccgacatagaccggtcttgctcccgtagagtatctgcctcaatccctgtcgcattaataatctttttagcgaacactttataagcttcgccagtcaactgatcgatcgcaaccacaccgacagctttcccattttcatagagaaatgtctctgctttcatataattgagtgccattgctccccttctagttgcttcttttaataagtcaaatacgagccgtgcatcgtcccgccaaaattcttggtagagaacagcgcctttgatcgatttgtcagaaagcaaaggcgcaaggcgattcagttctttttttgataaatgtttgcgcttttcctttcttgctaagtctgatatacgttcaactacctttgaaccaaaagaatgcctgccaaacatgccgactttaaaagcaggaagcagcaaaggaagctgtttcattaaatgcggagcattttcatgcaaaatcaagcgctctttgacatattctccgtgccatttcatgtcaagctggtgggcctgcctactctcattatgaaaaagggttgaccaggcacctgaagaacctgaagcaaaatcggctcgttcaattaaaacagtcttcattcccctgactactgcatcaagggcgatgcccgctcctgcaaccccgccaccgattactagtagatcgaagacatccccttccagctgctgtatatactcaccccgcaattcacttgaaaaagaatgaaccatctacaactccccaatctgtttgctcactttccttatcatagcattttttcacaataacagagaagtcagacgacaaccggaatccgattttttaaacaaatgttctgtttggatagttcagtgcttacagcgctaatgaacacacctttatcgtttgcctccttaatcgctttggcaaaatcagcgtctatgctgctttccatttccactgtgctaatgttgctatgttgagagacaaacagaaccgcactctcatactcgggcaacaaattcaaagcagtcaattcccggacatgttttgcgcccctttttgtgaccgcatctggaaaaaaccctttgctgccccgagcaagcgttacactctttacttcaagcaccagcgtgcgtccgtttttcgagagcaaaaaatcaaagcgcgattggcctattgttgcttctcgtttttctaactgccagccactaaatgcttcaagcgattgggaggctagcgcttcttctactagttggttggcaaaagtcgtttttaatgaaacaaggtcaccgccaggcgtctcacatagaacagctgtccacgccgtttttcgcaacgggtcaacagcaggctccgcccaaatgatggcgccttctactaacaattcacgcaaacgtcctggatcaggcaaatgggccaggacgttctcctctgtatcagtccgctttaactcgacaacaaaacgattggggcgatgaacgaactgcattttcgttaatggcggcaagcgcatggtgattcttcctttctatttaagacacattcgatctgtctgctcagtctgctttcacttattgtttataaacaacatgataaatgtcatcacggcggtcacgtaattgattgacgctgccagaacggcggtggcgccgcaaaatttccaaatccacgtctcctactacgactgtttcaatattagggctgcactcccctacgatgccgtcccgtgggaacgtgaaatcagacggcgtgaaaatgccagactgggcatactgaatatccatattggccacatcagaaagattgccgactgtgccagaaatgacggtgtaaatttggttttcaatcgctcgtgcctgggaacagtagcggacacgcaaatagccttggcggtcatctgtacaaaatggcgaaaagatgatgttcgcccctttgtcggttgcaatacgggccaattctggaaactcaatgtcataacaaatttgaatggcaattttgccgcagtctgtgtcaaatacttttacttcatcgccgccgctaatcccccaaaaaagtcgttcgtttggggtaatatggagtttatattgtttttcaatcgttccatcacggcggaataaatagctgatattataaatcttcccttcttcttctacataatgggacccacctattatattaacgttgtagcgaacagcaagcgtcgtaaacagcgcaatatattcctctgtaaattccgttaaacgacgaatcgcctggcttggacttttctcgggaagaaaagataatagctgaagcgtaaaaatttcaggaaaaacagcgaaatcggattggtaactagctgctacatctgcatagtactcacattggacagcaaaatcatcaaatgaagcaatttttttcatctcgtattggatcgtcgtaatccgcacagggaaagacgttttgaaacgccttttcggcgtagatggctggtagtcaatgttattccattccatcaatgtcgcatacttcatactcgctttgtcgtcagtcaagtaattggcattaactcgtttaagggaaaagccattaatcacttggaacgtcaaaaccgggtcataaatattatgcatggttacttggtctacatattcccgtggggaaattttgtccgcatacttgtagtagtttgggatgcgcccaccaataataatgctttttaaatttttttcccggcacaaatctttccgcgcttcatataaacggcggccaattttcatgcggcgaaaatcagggtgcaccatgacttcaatgccgtataaattgtagccatcaggatcatggttggtaatatagccttggtcggtaatttcatcccaagtgtgctggtcgtcgtattcatcaaaattgataatcaaactagaacatgagccaatgatttgcccatcgtattcgacgcaaaattggccctctggaaatatggaaatatggctctttaattcttcacggcgccacggctccatatttggaaagcatagttttgacaaatttataatatcgttaaaatccttttcttcgatatggcgaagaatgatttttttttcaaacctagacacatcaatttctttcatgctgttcacacctttctcatttgaacatgtcaatcattccgtagtttacctctttttcagctgtttgaatagtgtttttccccgttcaagtaaacaaggcaattacacggtaatagcgagtgcttcggtaaatgaataaattggtttttccaagatcacgatagcaacaaattcacctttttgaaaggtttagcatttcgtttccaacgaccaattgaaatgatgaatgctaagtcatttttggtatttctctcgttatacttttttaattcctctttcagtgcttcgccattattaaattggacaaatgccccttcattgccacagaaggcttacaaagatggatacaacgattaatgtgattgtaaacccaatgttggaagatttatctaacgtggttttaagtttaacagtatccaaaatcagagaaatgaagtaaggattgactagattagtacaggagatctaatacaacatacgaaacactatgttacacttagtttgcctaaatcacaaaatagacaatgttccttctttagctaacaagcagggtagatgaagagaagtcatactcatcaatcaggaaaatttttgaacggggagaggatggatgatggagctggagtatataagagattatgtgatgtacacagcaattttcggcatgtttagttttatttggttcgggtgggcacaggagaatcccagaaaaaactggcgtaagtatatgggaattgcttctggaattgcgttgctagtatgcttgattggcgtgtacttgagtgtgacgaactgggaggaagctactgctttgtcagaaatgaatgctttaactacttatatcattgttttctatgcccaattaatcatcggaggtcttggagctttcttattgactcgaaagaaaaaaaaggattacgttgctccgtggattgcttttctagtaggtgttcattttttctggctagtaaacgtctttgacgattctggtttgtatattttagcggtgcttatgataattattgccgttatatcaccacggctgtccaaaagatggggagttgccagcagtgcaatcactggcattggatctggcaccgttctattttgtttcgccatattgggattgattcgctatcttttggcataaaataattataaattgtaagtataaccaataaacggaatatatagaggtgctacataaacaatatccctattaaaaatagactatcgaatcatcagtcttaactttaattattgctgtaattacacttaactggaacgaatggagccaaggctttggcaaaggtctggccacacatttgcatacaaattggttgccggctaacgggttgggggatttagtagtcggagcgttcacatggtgtgatccccatttccagttggtaaaaagcgataaactatcaccaggagccattcacaagccggaaacggggcatattaaaaaaaatagataaaaatgcatagctattgaatgagcaatagggtaattgaaaaagcattcttttcgtaaagaagcacgaatcagttttaagcaactgcccgtttgtttgttgccctcttacataaactcttcacgaagatggagcgctcgtgtcggaaaatctgtaaagacggctggacagccccaagaaaataactttttcaaagttgtggtgtcattgacagtaaaagcccgaaccgcaatatttgcctgtttcatttcttcgatcaattcttttgatacgtacatactgtctaaatggtagccttttgcccctaactgcttcagatagctggttgctttaaataaaggcccttttacaagtgcggccgtttcaatgaaaggtaaatgggcttgcaactttgctagcaacatatggtcaaatgaagaaacaacaagacgctctttaaaccggttatcgtgaatgagcggcaaaatcgcatcaatgacgcgctcatgcggctggccatatccttttatttctaggtttaaatggagcgacggataactcgctgcccagtcgagcagttcagacaggaaagggatgctttcttgtttttggtacgtttgcttggcagctgcattcaattgtttcaactcattggccatatattggcaaacagggccttgcccattggttgttcggttgaccgtgcggtcgtgaatcacaaccggcacatcatctttcgttaattgaacatcgaattcgatgccgtctgcccctgcttttgccgcttgctcaaaagccttcagcgtgttttccggataagatccagacgcaccacggtgggcataaatcaacgttttcatccatgcacctcctttccgtttacgttcttcaaaggtttgttttaaaaacaaagggaggtgtttattctttactttccattcttacaaaaaaagtcccctttgtttctccttgacatgcaaggttaaattgatcaccatcagcgattgccccgacaccttctggcgtgcctgtaaaaagcaaatcgcccttttttaaaccaaaagcaagatggcattcttggacaatttcattaaacgaaaacaacatattctccgtattgcctagctggacgacctcgccatttcgttcgagagaaaagttgaggcttttgctttcttgttcacctggaaacgggaaaaatggcgttaggatggcagagttgcgaaaccctttggcgcggagccaaggatgccctttttgctttagcttgctttgcaaatctcgcaacgttaaatcaacacctatggccatctccgtgacgacatcatcaagtgtatctccatcctccatgtctttggcaattttcaatacaatctcggcttcataatggatggcccctttgtcacttggataaagaagcgtccttccgtcagccaacacagctgcgcttttaggtttgccaaataacaacggttctgtcggcacttcgtttcctaattcttttgcatggttggcatagttacggccaatgcaataaatgctcgcaatttcctccattccatccccctctgtgtcattacacggacgacacggtttcattgtcttattaaaacagatttaagttgcccactcgtgcgatcgcctcacgcaatgtcgttttgtcagcgaggagcccgatacgcacatatccttctccatactggccaaacccgtttcctggagcgacgacgagatgggctttgtcaagaagcagttcactaaattcctcggacgtatagccttttggtacagggagccaggcaaaaaacgaacctgatggttgttcaacttgccagccaatttcctgggctgcctcccaaagggcttcgctccgttctttgtacagaccaaccagctcgtgtacactggattgatcggattgcaacgcgcaagcagaagctgcttgaaggccgccgaagagactacaatggtaatgatcttgcaactcttctagcatcgcaacgatttccttattgccaagcacgaaaccgacacgccagcctgccatattgtacaatttcgacatagtaaaaagctctacgcctacatcctttgccccctcttgctgcaaaaagctgcatggcgtgccattaaacccgattgcaccgtaagcaaagtcatgaatgaccggaatacagtgcgaacgggcaacagcgaccgtatcggcaaaaaagcgcgcgtcggctgtcgcgccagttgggttgttaggataatttagaaacatcatttttgctttatccaacacatcagagcctagctcatgataatctggcagaaatcggttgttccttaacaacggcattggtttcgctattgctcccgttatcgcgatgcctgacaaatagtctggatagcctggatcaggtacgagcgccatgtcccccttatttaataaacattggcataactcaacaatggccgtttttgttcctggcacaatggcgacctcggtttcagggtccaactccacgccatactgctgtttgtaataagcagcgattgcttcctttaaaaacggatacccacgaaaagggccgtatcgatgaaactgcggctcgctgcttgcctcacgcagcgcctcaacaataaaggcaggagtcggctgatcgtggttgccttggcctaaatttatgagatcattatgttcttgagccaatcgttgtgctttgtttactaatttcgcaaaaaattgacttggcagctgttccatcatttttgcttgctgtatgtccatcgccatccccccactcactgtctgttattcctgttgcaaaaagcccttttctttcaagaaagcatccaaatgaggccgcttccgttcttttgtgtaagccgccatcgatgctgtccagccattggttcgtttgccattcgtgcgcttcgcataataagcgctcattgtttcatcataggcagaaagggcatcttcctgatcgctttgatatgtttcttggtggagcacagcttttaaaggcaggcgcggcttttgcccaggttcactgtcaggctcgcctatcgccatccccattactgggaatacatatgtaggcaaatgaagcgagtcgcttacttcctttggttgattgcggattccgccaatcatgacaccgccaaggccaagcgattcagcggcaagcataacattttgggcaaataaagcggcatccacagcgccaacgagaagttgctccgccccaccgacgtcaaatgaaacgtgatgctgtttgctggcacttgcatgccgtgaaaaatctgcgcaaatgacaaaaaacacactacactcctttacccaacgttggccgcctgttaaatcggcgagtgtttctttacgagcagcatcctccacagttataacggagtacgcttgcacatgatgggacgtcgacgcccactgcgccgagctgataatcgtttcaatttgctcctttgtgacgcgcttatttgtaaaagcgcgaatcgaccgatgactggtcataagctttagcacatcattgctttccatctccaccaccacctgtttcatttttttgctgataatggtagtgtactaaaaatgccgaaaaagaggaactattagcggcaggatcagccgattttcttactaaatcatacaaaaagagaaccgtatcaatgttgcgccggctctcttttcttaaccaaagttattctacaagtgtgctttttgcgtataaacgcttgccgcttcttcgtcggcaatgactgtgacatttggatgcttgtttaatatagaagccgggaacgcctcagttacttcatctgagcataatttggcgaacgcttctgcttttgctttcccggaaataagcaacaaaatttctttcgcttccataatcgtttgaatccccattgtaatcgcttgtttcggcacatcttctaaagttgggaaatacctagcattggctttgcgtgtttcttcggccagctcgacaacatgggttttgctcgaaaatggcgtccctggctcattaaaaccgatatggccattgctgccaataccgagaagttgaatgtcaattccgcccgcgtcggcaatcatgttttcataagcacggcattcttcttcgagggacggagccattccatttggcaaatgcgttttttcttttggaatatcgatatgatcaaacaaccgttgctccatatagtggcggtaactatttttgtcctcagcaggcaagccgacatattcatctaaattgaacgtttgcacatgtgaaaatgattggccgttttcctttgcttttgcaatcaaagcggtatacgtattttccggtgtgccccctgtcgcaagtccgagcgttattttcggagactgctgaattcgctcaaacaagagtgctgctgctttttggctcatttcttcataattttttacgtgaataatattcatacgtcatcctccttgccatatgcttttttccctaaacagtaggtgtacaacacgtcgccctctttcgtgagcacagtaaaatcgccatctttcccaggcaccaatgacccttttttcgcgtcaatgccaatttttttcgctgggttgtaggaagccatttgcaccgcttgttccaatgagcagccagtataagcaaccatatttgctaccgccttgttcatttgcaaaacagaaccggcgagcgtgccatcagaaagcgtcgctcttccaccgttaacagaaacgtcctgtccccctaaatcataagcaccgtcaggcaacccttttgccctcatcgagtcagtaataagtagacattggtctgtgccctttgctttccaggccagcttcaccatttctggatggatgtgaatgccgtctacaatcaattcaatgtcgagttcatcaaggaggagcgccccaccagctacacctggttcacgatgatgcaaaggacgcatgccattgtacatatgcgtaacttggtttgcacctgctgcgacagcttgctccatttcagtatagacagcatctgaatggccaattgacggattcgcaccttctgaacgcaaataggctgccaactcacttccatttcgtttttccggtgcgtaggttacttgtttaatcatgccttttgctaaatcgatccattttttcatgattggtacggatggttctacaatgtactcgagaggctgtgcgccttttttcgtttcattaataaaaggcccttcaatatgtaggccgacaatctctgcttctttatccgcccgtctataagcgactacattttcaatcgcagcttcaatgtcctcatgtttttgggtaatggttgtcgcaagaaaagcggtcgtcccttcggctggcaagtttgctgccattgtttgcaacgcatcctttgtacggtccattacatcggcaccatagccgccatgtatgtgcacgtcaacaaagcctgggacaacaacggcatcagctggaaccgttatctggactgtatctttattcttataatcggcgccgtcgccaacaccgaccgcggtaattttgccattgtcgattgcaagaaaacctttctcgtatttacgacaccctggttcccctgtgatcaactgcccccctgttacaacgatacttgccatgcgatcaccttcctcgtttcatcattccctttgtttcttttagtatacgctctagtcgtttagttgtctataccaattacaacgaaaaaaaagttatggtatactgattttatcatatgttcggaggataaaggcatgattgacaaacagtctcctattccgatttattttcaaattgaggagcttattaaaaagcaaattgccgacgggattttaaaaccaggcgaagcgttgccatctgagcgagaatttgctgacatgtatggcattagccgcatgactgttcgccaaggcattaacaatctagtccagcaaaaaaaactatatcgggaaaaagggcgaggcacattcgtatcgtggcctaaaattgaacaaccactctctaaaatgaccagttttacagaagatatgaaaagccgcaatatggagcctggttcaaagttgctttcttttaaaaccactaaagcggatgaaccgattgccaaagtgctcgcggttgaggaaggcacccctatttatgccattaaacgtgtgcgcctagcagatgagttgcctattgccttggaacggacttatattgcttgcgagctcgccccacatttaaccgctgacacattgaatcattcgctttactcctactttgaacggacatgcggctattcgatttctgacgcagaacagacaatcgcagccgtcctcgctgacgaagaagatgcccggtggcttacggtgcctgccggctccccgcttttggcgattcgccggcaaacaagactggaagacaatcgtgtattagaagccgtttattcccattaccgtggtgaccgctaccactttgtaacgaaaatggtacgttgatgttgtataaaaaagacttaaggcgcctgactcattagcaggcgcctcctctttatgctcaaataaaaaaatttcgttgtttttttcagaaaagtattgacagtacaatttgttgctgctaatttagaatcaactacaatttgtacggacattataacatacgtacatatctggaaggttggtgatctctttggttggtcggttaaaggaaagtccctcacaggaaatgattgacttattgtttaagccaagtattcgctccgatttaaaacaccactattcatacttgctaaaaattaacagtgtccacttatttatgctaaaatcggaaggtattatctcagatgaagcagccagtaaaatccattccgtcctgacccacttgcaggtgacaggaaaagaggcattgtcgatcaatcctgctcttgaagatttatattttaatgtggaagcttatattatcgagcaaacaggaccagagatagggggacaaatgcacacaggaagaagccgcaatgatattttggcgactgtgacccgtatgcgaattcgcgaagaaatgctcgaaatttacgaactagtctgtacactaaggcgaacattaattgatttagccactgaacatacttcaacgttaatgactggttacacacatttacagccagctgaaccgattacgtttgcccattacctttccgcactgttgcacggattcgagcgggatttcacacgcctgtataactgttatgcccacatcaacaaaagcccgcttggttcttgtgcccttgcctcaactacgttttcgattaaccgaaagttcacgatggagttattagggttcgccgatttgcttgaaaattcgcttgacggcatcgcctctagagattatgcattagaagcactttcagcattaagcatatttagtaactcattaagccgcttcgcacaagacctttacacttggtgttcgtatgaatttggttatcttgaagtcggtcattcagtagcagttattagcagcattatgccgcaaaaaaagaatcccgttacgctcgagcatattaaagcgaaggctggacatattcaaggcgcacttgtatcctccctctcagtattaaagaataccctttattcgcattcgcgggatacaagcatggaaagcatgaaatacacatgggaagcaatcaatgaaacgaaagcagccattcggcttatgatcaaaaccttacaaacgcttaccgttcataaagacaatatggccgctactactcgacaaaactttagtactgtgactgagctagcaaatgcgctagtaagacactaccacttttcgttccgcaccgcccatcatatcgttgctgaaattgtcaacgagacactgaatcaagggctgggatctgataaaatagaagcaagtacagttgaacgtgctatcaaacaggtaacagcaaaaacggtttctgtcaccaaagaatttgttgagcaggcccttgatccggagcgaaatatttcccttcggaccgtacgcggcggctcagcccctgttgaggttgcacggcaattacagcagctcgaacagacactagcatcagatcaccaaaaaatcagtgatttgaaacaggctctgcaatctgctgatcaactatacaaacactacgctgcggaactcgaaaggggggcgcagtagtatgaatgagtgaggcgagccgacgtgattgatgaagaaagcagcattcccctttatttgcaattaaaagatctttttgttgaaaaaatagacagcggcgaatggcaagaaaatgcgaaaattccagacgaacttacattggcgagtcagtaccggttaagccgctcaaccgttcgccaagcattgttaaaactcgttgatgaagggcgtttgacccgaaaacaaggaaaagggacatttgtgaatgagaaaaaaatccaaacgcctgtgtttagtttttattatcctgaaaaattcggtaaaaaacataccgttttgtcagctcaagaactagcttgctcggcgacagtccagtcggcattggaactatttcctggcgaacttgtctatgaacttatccgtctacgctattttgaggatgaagttgtcgctgtggaaacatcttatttaccgagtgcagcggttcctggtttgttgcagaaaaaccttgaaggcacgctttatgaactattgattactcagtacaacttgcaaatccaagcatatgacaccacggtagaaccggtcatcctaacccagttggaaaccgaacgcctacaagttgaaggcaacggacagcctgcattaaaaattacaaaaatcggctcaacatggaataaaaagcgcttaattctcacgaaaagcattttcagaggcgaccgctgtaaactcatgtttcaccatgaatagagtcgcccatctaaagctttgttgcaatagagctttagatggcgttatttttacagaatattcaattatttgaggaggggtttgtgtggatgtatcgatttgggtaattgtggcaaacatgattgtgctcttaggggccatcatcttttccttttatattagcaaacgtactcggaacaacgaaggctgggctgttggcgggcgggctttgcctgtctatgtcgtcattttaacacagttcgcgacagcttctggcggcggcatgcttgttgctcaagtcgggatcggctatgctttcggttggagcgtgatcacttatggcttgttcacaggagcgggagttcttgccttactgtttcttgcgaaatggttgcgcaaaaacgattttattagtctccctgatattttcaaaaaaatatatggcactcacccgttcttgatcacgacaatcacatttatgacaatggttgtcccctttggttggctgtgtacacaattagttgctttcggccgattgttttcagaattgactggcgttgaaccttggctgttaatgcttatcttcacagtcatttgccttttattcattatcccaggaggaatggtatctgttgcctggacagacttgatttttgggattctcatgctcgtgatggcggtcgttgcttctatttatgcgatcacatcagccggcggttggtcagcgatcgtacaggcagtccctcaagagaatattggcattgaaggcttttggtccgttgggcttctaacagtgctcttttggtcattatcgctcacaccaggcacaatgaccaatcaaatgtacttccaacgcatttatgctgctgacagtatgaagacagtcgtcatttcattgctttctactgccgctctcctcattttgacgaagctttacgcagcgttagtcggcatgtccgcctacacgatgaacccgaacttggataaccctgaaagtgctgctggcatgtttttatcgaatatgccatcgattttaatggtcgcctattctactttcatttgtgcaaccttgttgtcaacggtcaccagcgcagtccaatcggtcgtcgttaatatcacccgtgatatataccagtcgtatcttaatccgaaagtcagcgacggacagctactccggacatcgcgtattttttcagtatttgtcatcttctttgcatttgctcttgcgacgttatatccacgggcacttgactggattgtcgcttcttatgcttattcagccgcaggtctgtttgctccactgtttatcggcttcgctttaaaagacagacaattccttactttcaaaggcgcgattgccggtatgctttttggaatcgcaggcgcaggcttagcccatttgctcggtacaaccatcccatacgttgcgtttggcttagttgcctcgacaattggcctgctcctagtaagtgcagcgacccgaaacaagaatacgacaactgtcgtccgtaaagaaacgtccatttaacatcactgagaaaagcaggctgcactagcctgcttttctcagtcatgaactaatataatccccgccattaatatggatcgcctgtccggtcatgtaggaagagtcgttagaagcgaggagtacataggcaccgacaagttcactcggctgccctgctcgtcccattggcgtcgttgtgccaaactcagacactttctgctcgtcaaaagaagcaggaatcaacggcgtccagatcgggccaggggctacgctgtttacgcggatatgctttgaagcaagcgcctgcgccattgaacgggtaaaggctgtaatggcgcctttggtactcgtataatcaatcaacgtcacgttgccccgataggcattaatggaagacgtattgataatagcgctgccaggcttcaaataatcaagcgctgctttcgtataatacacatacgaatagaaattggtcgcgaatgtacggtgaagctgttcggctgttagttcccgtaaatcgttgactggatgttgctctgcagcgttgttgactaaaatatctaggccgccaagttctgtgactgtacgttcaacgctctccttacaaaacgtttcatcacttatgtcgccagaaattgtaatgcactgaacaccttcttgctcgacgcgctgctttgtttgttctgcgtcttcatgctcatctaaatagacgatcgcaatatgggcgccttctttggcatacccaactgccacggcgcggccgatacccgaatcgccaccagtaataagcgctactttgccgcgaagttttcctgtacctttgtaatcgtcgtcttcatagatcgggcgcggttccatcaccgcttcatcccctggttgcttgtcttgtttttgcggcggaatgccgtttgctaaataattgtgtaagtccattttctctctttcctcctcttcttcatcattagtattggtatacctcaaaagtgagggtatttaaacatcagcacttttcatccgttaaacacctgaaatttttgctaaaaaactgcatacaaacgcgttttgatcatgctaatctgtgattaaggtatacaaaatagctctttttcatgcaaaaacaactctacttggacagccttcaaaaaaagcggtatactctagcatagattgaggtgaaaacggtgaaaacaatccacgtaacaagaaaacttctttccaaatacaaaacgattgaagaagcgttgcttgatgcgaacgatggggatacgatcaaaatagatccaggaacataccaggagtctgtgacaattgccaagtctgttcatttagtcggccttggcgaaccagaaacagtcattattcaagcgccaatggagatcatcaataaagcgtcggtgtcgataaaaaacatctcttttgcggaatgcgaaaaagggctaaccgttaaaaacggatatgcgcaattgactcattgccagtttacccgcctaaaaaaatgggggatccatgttcttgaagatggccatcttgatttaaccgacgccacgattcgccacagtggcatcggcctatttgtagttgggcgagcccgtgccgagtactgcgccttatacagccaacggggcagtcaagtatgtgtaagcgggaacggccggtttgtgatgaaacactcgcatatttaccaaggaaagagcgcggcaatttattttgaccagaacagccgcagttttgtggaaaattgccaaatctacggccatcattctgaaaatatgcaacttaaatcgatgggcaatagtgaagtggctttaaaagattgcctgatctatgaaggctcttctggaggggcacttgtcctcggcgaatcaaaactgacattgaattcatgtacgttgacgaataatgtaccgaagcaagtagtcgttttaggcggggaaacgattatccaaaacagtttgtttgaagctggacaaatcggagtcgacattaacgataacggtactgcccaacttgaagcaacgattctcacgtcgcacgaagacgaccatattcgcgttggcgatggcgccctttacgtgtatagaagcacgattaaatttgggcaaaaatcaggggtagtcctgacgaaaaacgcttatgcccatgtggaatcaagtgacttgttcggccacatgatgccacaattagcagtaagcgaacaagctcggataagcctaaaacatagcgctatcttctatggcaaacattatgggttttggctaacggaacaagcaagtgcagatgtgggccactgtcgcttttatgaaaatgaactgaatcaactcgtcattgctgacaaaagcgaagccgacctagaagacatacaagtctttgatggagcgcaaagcggcttatatattcatgaccatagccatgcgaatgttgtaaattcaactttttaccatcataatgacctttacccgcaaatttatgtaagcagccattccaccattaccatgaaagaaagcaagctttatgacagttatgagagtggcatccgctttgacatggaagcgagcgggctcctggaacattgccagtttagcggccattatgaagcacaaattgatatccaacatagcgcgccaacgattcgagaatgcgtgatcgaaaacggcgggacctgcgccatccgcttgctccatgctggcggcttcatcgaaaattgtacatttaccggtcatgaacacaatattgccattgggggcgaatgcgacaccgacattatcggccaagaagctgacgcattgcgccaatacgctgaagcattaagcgtgacagaagaaatggaagcacagctctcacaagctgaaatgcgagcagcactagaaaaagcacacaaagacgcagaacgtgaagagcggacagtggaaattgtcggtctggtagaggaattggaagaacaactcgggaaaaaataatcctttagcagataatagctaaaaattgaggcgccctctacaagaaggcgcctcaatatagttgaacatagaaataatcggtaaacggtcctttcttttaatcgttacatgtcaaatctgcctctgttttgcaacttctaaagctttaaatcacgggcttatccattttccgtaaaaacgcgatttgcccgatatggtaggcattatgcgttgttgcatttgcaattaacccccaccattcggcctctaccggatagccttttaccttctctgacaattgcttttctgtaattaagtcctgccaacgcaacaaaatgtccagcagctccgtttgcaaagtttggaaggttttatttttcgggacaagaaagctatccacattctttttgacgctcggtactgtacatgcgtccgctttttcatagcgtgtctgccatatttgattccagtagattaagtgttggacaatctcggcaatgctatggctcgatttgtcaggtttccaaaacgcctctatttccgtgatccctttaacagcttcttggaaaggaatataccagctggggtcatttgcatttgctaataattggtctaacaatacggtcttagcatcaaccatttttctaaactcctcctagatcttctaaaaaatcggattaggcagtttccactggaactcctttctgcctgtaccgctgtttatccgctatttgactcctattttattaaaaacaaaaggataccatacacctactatcacagaagtgatatagggcgttggaaccatgtcaatcaccgtatattgcgccaaaacaaacagtagcccgctaaaattgccgcctagacgtaaagagtcatcaaaaacatagcgccaaaacaattgatgaaacagccaacagacactgaaaacagcaaaagaccagcaaatacctgactgctggtcgtcttgtttcatttcttattccggtacaaatacatcgtgagcggagcaaaaacagctgcaatcaaaaacgatacagctactacccagcctacctgttcaccagtagccgttccatgcatgaagccacgaacggcatcgactaataaggagattggattgatgtcgacaaaaacttggagccacgatggcagtgttcctggatcgacgaagacattgctgacaaaagtgagcggaaacagcaccatcatactgaccatcatgagcgacttatcagaacgcataataaggccaagcgtcgtccaaatccacgataaactgaagcagaaaagcaagattagcgcaacggcggcaatgacgccaagcgctcccccttctggacggaaccccagaataaggccaagtataatcatgatcgccgatgccattgtatagcggactgtatctaccagcaacgagccgatcagggccgaaggcagccagagtggcaacgttcggaaacggtcgaagatgccttttcgaatatcgttgtttaaatcaagtccagtatacatcgtaatttgcgcgacggtcatgacaagaatccctggcaggaggaattgcaaatattcatttgtggagccagaaatcgcaccgccaaataaataagtgaacatcaacaggaaaataactggaaaaactgtcacatcaaacatttgttcaggaatgtgcttaatccgcagcagtgccctagtcgcgaatgccattgacgcagcgagtgggctcgggcgaggcgggcgcctgcttttggcaatcgcatccgctaattgcatgctttgttcttgtttatttccttccgttgccttgttcattcacttccctccctttcttcctctggggtttgcaccatttcaccagtcagcgtcaaaaagacttcatctagactcggctgcccaagggagaaagtacggacagctatgtttgcgctcgctaactttcctacagcagctgccgccacatctggattacccgtttgcgcggtaagcgacgtcgggtcttttccaggatgcaccatggtgttctgatcttccgccagcaattggatcgccctttcctgatcacttgcatgttgcagcgtcaagtggagtgtattcgtgccaaccgatgctttcaactcactgcttgtgccttcagcaataatcttgccatggttgataacggcaatccggtccgccagctggtcagcttcctccaaatattgcgtcgtaaggagcacggtcgtcccagcatcgactaatgtacggacaatatcccacacttggttgcggctccgagggtcaagccctgtggttggttcatcaagaaacagcagttcaggggtaacaacaatgctggcggcaatgtctatgcggcgacgcatcccgcccgagtaatttttcacttgcctttttgcggcttcctctaatccaaatgcatggagcaattcttcccctcgctgttttgcttgtttccgcttatagcccataagtcgggcaatcatcgtcaaattttcgatgccagttaaatcttcatcaatggaagcgtattgtcctgttaaactaatccggcttctgactgcatctgtttctttggcgaggtcatggccaaaaatcttcgcctcaccgccatctggttttaaaagagtcgcaagcatgcggattgttgtcgtctttcctgccccgtttggtccaagaaacccatagaccgttccttttacgacagacaaatcgacgccatcaacagcccgatgcttgccaaatactttcacgaggcctttcgcctcgatcgccttttcttctgtcatttgtaccaactgtagccagcccccttttttaccaacattacttctattcagtcaaacgctcatttatgctcaaacgcctaatccataaatgatcacgctttgcgcctgacacttggaaaaatacactacatcatgatatagacagcaagacagatggcgcgcacttcattccgtcaatcaagtatagcaccttgttcgatgttactaaacggttttgtctgaaatataaaacaaatgctgctagccaatcatcctcaccttgctggactgttaacatcgcaggctctcttttcccagctggcaagaatgataaaatcccttcgctaaagcaaaaacctcgcctcgtgtataaaacgaggcgagcttatttgtgtttcgttaagaatgattcggagcttccgtcaagtcttctgcccttcctggcaactcttcattgctgtcttcagcaggttttgcccgtttcatgaaaaaggctagtactaacgcaataattgaaacgtatacggtaaccatgaatgcgtcgttgatcccttcgaccattgcctgttggccgagaagcgcaggatcaattgtcccagctagctcctctgcatggattcttgtctgtgtagacataatcgtcacaagcaacgcggaaccaaccgcccctgccacttggtttagcgtattattcatcgcagttccgtgtggattcattcgtgcgggaagctggtttaaaccatttgtcatgacaggcatcatcaacatagacatgccaaacatcctaaatgaatacaacataattaactccgtataagaagtatcaagagccaatgtcgtgaaaaagtaggaagtaacaatcgtgatcaacaagccagtgattgctaaaatgcgcccgccaaatttgtcaaacaaacgtccggtgataggggacatcgcccccatgattaaagcgcctggcaacatgagcaagcctgcatggaaaggcgaaatgccacggaccgtttgaatataaagcggcataagcaacattcccccaaacatgcccatcgtcactgtaagcgaaatcgccgaagataaagcaaacatcgggtatttataaatccgaaagtccagcatgggcttttctaattgaaattgccgcgtaataaacaacacaaggccaaccacgccgatgacgattgtgccgtacacttctaagctagcccatcctttgtcgccagcagcactaaacccatacaatatcccgccaaaaccgatgcttgataaaataacagacatcacatccaaatgtgtatgcaccgattgtttattgtcatataggcgaaaaacagcgagtaaaagggtaacaatcgcgaacggcagcatcatataaaacaatacacgccattcataatgctccacaatccagcctgacaacgtcgggccaattgccggggcaaataccatgacgaggccaaaaatgcccattgccgatccgcgcttttcaacgggaaacgatgttaacatcacattcattaacaacggcatcataatcgccgatcctgaagcttgaatgacacgccctgccatcagtacaggaaaactgtgggagaagccagctaatgcggttcctaaagtaaacaatgtcatcgccgttaaaaaaagcccgcgcacggaaaatttttggattaaaaacgctgtaatgggtatgagaattccatttacaagcatatagccagtcgttaaccattgaacagtcgcaggagaaatatcaaagtctgccatgatagacggcaaagccacgttaagcaacgtattgtttagtaacgcaataaatgcacctgcaagcagcatcgcaatcattttatatggcggtttcgttggtgtattttctgtcattcaataaccccctctaaactgtcggtccaatatatatacaccaattctatagtaataacgagatttataatactcctttccattcctcttttcaagcgaaaaatttgcgatttgttttttttacaaatgtacggtagcattaaatttggacgactggttcagatcattcaatacggggtgacgcaattgctgaaacggaaagaacatgtcattgaaacagcgcttaacctatttttaaaatccggcatccaagggacttctatccaaatgattattgacaaaagcgggatttcaaaaggaacgttttataactattttcagtcgaaaaatgacctcctatacggaatcattaaattgatacacaataaagttatcgccaagaggaaagaaattgaagatgatcccgctattacagggatggaacaatttacaaaacaaacgatgctgtttagcaagacaaacaaaaaatacaacctttttcctttatttgaacaaatttttttatcagacgacccttcattaaaaaaactgttccagcaatatttctttcatgaaatcgaatggattcaaaaccagtttgttcgcatgtttggcgaagaaataaaaccatacagcttggatggagcccttatttttaacggcattatccatcaatttatgcgtgtaaaaacgatttccaaaaaagaagaagaccaattttacgaaaacgttgtccgctatgccgctgaaagggcagaagagtttttctccagcatgcagcaaacacacaaagcgccattgtttactgaaagtttgttgcgggattggcttgaccaaaaagctacaacacccatgaaggatcaacggcattttgacacagcgcacaatacccttaagacagcgattctttccgcaaaccacgatacacaaatagaaaaaggcttgctcgaggggctggaatttattgagcatgaactaaaacagcaggaaccacgaacatttgtaattgagagcatccttctctcctttacagcacatgcttcagaatggaaggaaacattgcatcactataaaaaagcgcttgaaccttttatgtaaccagttgttcaatcgatttagacagcaatcgaaaatagatgtttaacaggccttttaagaaagggagaacattcacggtttaatggaagcaacgtttatggatgtacttttttctgctatacttttaaaaaaggagtaatgcttcatgcctatcatcatgttggttgcaatttttgttgttacgtttgtagtcgtttttttgttaagtggcgtaatcgacacacttttgaaaaacaaccctagtataaagcggtggttcctctcatcactggcaattactagcatcatctttgtgtttatctggactacaaatctcatttaacgttgtcgtcaaaaacaaatgttctagcaacgaattcatcacgatcatgctttaacaagtcgctagcgatgcgttcattagaacaagagatataaaacgaataaaatagtggccactttcgttgcaaaaggaaaaaccccctaaacgggggcttcctctgccgatttttgaaagaaaaattttagggcgtggtaaacatcgcctttttcttttaaaatatagtgcataaaacggggatctgtgatgtttttgtacgcactcattaatgtcgaatggcgcgaatattgattgacttccccgtagccaaacaagttggaacgatccatcagctggttaactagttttaagcaacgtgcgttatcagacgttaggttatcaccgtctgaaaaatggaatgggtaaatattatacgcacgtgggttgtatttctcgtcaatcaactctagcgctttcctataagcggatgaacaaatcgtccccccgctttctccctttgaaaagaaatcctcttcgcttactactttcgcttctgtatggtgagcgataaattcgatttcaactgtttcgtattttgtacgtaggaaacgagtcatccaaaagaaaaagctgcgtgccatatatttttcaaaccgtcccattgaaccacttgtatccatcatcgcaataacaactgcttttgattctggccggatcgtttccgtccaagttttaaaccgtaaatcgtcattgtaaatcggcataatgttcgctttgccatttaaagcgttgcgcttaatggcggctaaaatcgtacggcgtttgtcgacatttcccattaacccttttttgcgaatatcattaaatgcaatatcttccactacaagctcttgttcttcttttttttgtaaatttggcaatgcaagctcagaaaaaagcatttcttctaactccacgatcgaaacttcagcttcattataatcttcgcctgcttgatcgcctgcgcctgaccctttgccagcgcctgcctgtttgtcaccatttggatcacgagcaacgatatcgccgattttgctgtcgcccttcccttggccaacatgttggtttttgtcatagttgtaacgaattttgtattcatctaacgagcggatcggaattttgatcacgtcttttccattggacatcacaatgttttcttcactaactaagtcaggcaagttttttttgatggcgtcccgtactttttcttggtgtcgacgttggtcttggaacccttttcgatggagggaccagttttcctgggagattgtgaactgccggccgttgtctttttccataccttccctcctcagtaaggtttgtttacgtttatcgattgaaagtggaacgtttctagttgattgtgcatatcataaactggtgcaaaatattgttgcatggctacttttcttatcctatgtaagacaagagcaagagttgccaagaaatttttattggacaagccaaaccgcgccatggtaacgatgaaaaggctaactgataataagcatttcgtatgtatgcattttgcaaaggcctcgttcttgcaccgctaaaacctatcaatataaaagcaggctcccccctttcgtacattttttgctacactaatgtaaaaagcagggagagcctatgatacctagacatatgtacattacacagttgcactacgacaagcctgctaatgggcgacatcttggttttcctcatacccttccattcctgcaaggctttgatagtctttcttttaaaaaacctgtcaccatttttgtcggcgaaaacggaacaggcaagtcaacgttgattgaaacactagcagcgttaatggaattaaaccttgaaggcggctcaaaaaaccaccgtttcgaaacagaagcaagccattccagtctctaccaatattgccgcttaactaggggggcctatcgcccacgcgatgcttacttttaccgggcagagacgttttataatttggctacagatatggatcaatttgcagaaggggaaggagtgttatcacaagaactatttggccgcaatttacacacattttctcgtggtgaggcaatgaccacgttaatgaaccatcgctttttcggcaatggcttttatttgatggacgagccagaaactgggctgtctgtaaactcccagcttcaaattctccttgccatcaaggaacgaatcgccaaaaactcgcaatttattttcgcgacccattcgccgatattgatattgtatccaggagcacaagtgtttcaactaagtgaaggcggcattgaggaaattgctgcagaagagacgcagctttttaaagattggcgcatgattatggaacggaactcctattttattcaccaactcttttctgattaaatgcaaaaacgagtgctaaaagcactcgtttttcaatccatatagccaaattcagatactggccaaaaacgcaatccgactttgccgatgatttcatcttcattaactgggccaataacacggctgtctaagctagcagggcggttgtcacccattacaaacacatggttctctgggacggtttcttcaaatgagtaatcttccgtatacgcaggccctgaataagcagcttttgcttcttccaagtaaggctcttcgatttgctcgccattaatgtaaaggatgtcgtcctcaaatcgaatggtatcgcctggtaagccaatcacccgtttgatgtagctatcctcttccgtcgcatggaacacaatgagatcaaaccgctcaggctcgccaaattggtagcttaatttatttacaataaaacgctcaccgtcatgagcagtcggcaccattgagacgccgcgaacttcaaagctggtcatcacaaatgtccggactacaaacgcaagaataagcgcaattgcaatcgcctttacccagccccaaaactctgatttcttttccgcttctgccactgctgttcctcgctttccgtcttccattcatgagcatcctgctcgcctttttattaacgtatcattaattcaaaaaaagaacaagaaatcctccacgaggcgatgcggaggatttcttgcctaccggttcaaaagtgagccaacatagcggagcaattcgttagctgaaactgagttatagccatgttcatcaatgagtcttgcgatgacatcattcatttttttcaactgtgattcatctggcgttttcacagaagtcgtgatttttacaatatctttcaaatcggcgaatagctttttctgaatcgcttcacgcaaccgttcatgggagttgtagtcaaatttcttcccttttcgggcataggcagatatgcgaattaaaatctcctcacgaaatgcttttttggcgttttcggatatgccgatttgttcctcgattgaacgcatcagcttttcgtctggcgacatttcttctcctgtaagagggtcgcggagtttgtttttgttgcaataagcttccacattgtcaaggtaattgtccattagcgtcttcgctgattcatcgtaagagtagacgaatgctttttgcacttcctctttggcaatcacatcgtactctttgcgggcaactgtaatgtagtcgatataccgttctttgtcctccttagaaatcgaagcatgggcgtcaagcccttccttaatcgaacgaagcacatccaacgctgaaatcgatgttaattgcttacggataatcgctgacgaaatgcggttgatcacataacgggggtcgatcccgctcatgccctcgtcaggaaactcggcctgcaattctttcacatcctggctgttgtatccttcaaccgcttccccgtcatagagcttcatttttttcactaggtcaattcccgctttgtgcggctcttttaaacgagttaaaatcgtaaagatagctgctaccttcaaagcatggggggcaatatggacatgagctaagtcgctttcagcaatcatttttttgtaaatccgttcttcctccgaaacttttaagttgtaggggattttcatgacgatgattcttgaatggagtgcttcattttttttgttggagataaacgatttgtactctgattcgtttgtatgagctagtatgagttcatcggccgaaatgagcgcaaaccgccctgctttaaaattgccttcttgtgtcaacgacagcaaatgccatagaaatttttcatcgcatttcagcatttcttgaaattccatcataccgcggtttgccttgtttaactccccatcaaagcggtatgcacgcggatcggattcagacccaaattcagcaatggttgagaagtcgatgcttcctgtcaaatcggcaatgtcttgggactttggatctgatggcgaaaaggtgccaatcccggtgcgtttgtcttctgagaaaaacaccctttccactaagacatcttcaattctccctccgtattcctcctctagccgcatcatatttaaaggcgacaaattgccttcaatttttatgccatactcctcttcaaagtctttgcgcaaatgcagcggaatcaaatggagagggtcctcattcatcgggcagcccttgatggcataaacggcgcctctgtcggtgcgtgaatagttctcaagaccgcgcttcaacatcgttacgagcgtcgatttcccgccgctaactggccccattaacaacaaaatccgcttgcggacatcgagtcgtttcgcggccgaatgaaaatactcctctaccagcttttcgagtgcttcctccagcccatatatggaatctttaaagaaggaatacactttttttccgtttttttcttctacgccagcgtcttttatcatattgtacacgcgtgagtgggctgtttgagtgacccatggcttttccttaattaacgctaaataatcggcaaacgtcccttcccactttaagcgttcttcttcttctcggtattgttcaattttttttagaatatccaatgcgtatacctccgtcctcgtgtaagcgagattacttaacgttatgccgaatgacgcatgaacatgctactttttgaaaattgaatctctgtccgtcccaacaaaacagtggtatactaaacccatattaatagaaagcgagttttgtcatgaaaacagggacaggctggatattaattgcggttttagccttatcgaccgtttttttattttccaacgtaacggcagaaatcacaaacgtacaatcagtaagacaaatagtcaatgagcacattgaccgcgacgccctctacttgtcttcaaacagtacaattgttgatgccaatggccgaacgtttgcggaactaaataacggaacgaaccgagtttacttgccttatagcgatattccagaaacagtcattcatgcttttatcgccactgaagacaagcgtttttttgagcaccacggcttcgatgccacaggcattgccagagcttttcttgcaaatgcaagcgaaggcggcattgaccaaggggcaagcaccattacccagcaaatggtacgcaatatctttttagaccattcccgtacatatgagcgaaaagtgagtgaactgctttatgcctatgagctggaacaacagtattctaaggaagaaattcttgagctttatttaaattccatttacttcggcaacggcgcttatggcgttgaggcagcggctcagctttatttcagcgaaacaacgaaccagttgtcccttgcgcaaatcgcgtttttgacagccattccgaataatccaacttattatgatccttttaaagacgaagccgcacatacccatgaacgaaaagaatgggtcttgcaaaagatggaagaggaagggttcattacgtctgctgagcataacgaagcattggaagaatcgatcgtcttacatcgttcccagcttaaaaacgaatttcctgattacagcgattttatcttagctgaatttaaaatgcttatccgccaactagagaatatggaggaagcgccaagcgaggaagtcgaagcgcgcgttaacgaactgctgaaacaaggggtaacgattgaaacagcgcttgatccagaccggcaacagcggctagtcgacagcgtggttcgagaattgcctgacaacgcacaaggagctgcgatggtgatcgataatgataaacgtacgattgtcgcgattagtaacggaagaggctacgaacggggcaacctcatgtacgcgacacagtcgtttcgccaccatgggtccgcttttaaaccattgatcgactatgtgccttatttagaagaaacaggtgctccgctaaccgcaacttttaacggcaatccatcgcctaactgtgctcaaaacagcagcaaacaaacagttggctgtgtgaataactacaatcatgctatgcctggcgttgtcacaatgcgagaagcattcaaacattcctacaatgtcccggcggaatacatgctggcgcaagtcggcgtcgaaaaagcgttatcttacttagagcctttttcttttagcaaacttaatgacgaggaacgcggcctcgctcttgccttaggcaccgttgatgtctccgtttatgaaatggcccaagcctattccacttttgcacacgacggcaaatttgctccagcacatggcatcgttcgcgttgttgatgaacacggggaaacgctctatcaatgggacgatgtgaaagaagtgcttgtctggtcaaaggaaacgaatgacaaaatgcggacgttgttggcggatgtaatcgcctcagggacaggcaaaggaattacgttggggcaaaatggctacatcggcggaaagacaggaacgagcagtcaataccgcgaccttgccttttctggactaaccgacaaatacacggcttcggtatgggtaggaagggatgaaggttccgtggaagacttgtcgccaagacgaccagcaatgaatatttgggaaacggccgtacgcgagtagcctggccatcaatgggaacgaagataaacggacgtagagagggttgataccatacaaaaaaccggttcccgactcacgactaaagacaagcgctctatttagtctagtatggcagggtcttccggttttttgtaacgggctattgtttatgagggttgtcctcatagcctccagcaaaaattgaaattaaaaagacgacacaaacgctcatcatcaaaaacgttctcatttttcctactcctcctcgcaggggctcggctgattccatttcattatagcgaatctgctcacacttgaaaagcattccagtaaactttctaaaacgttttcacttaaaagaaagggttttttcactatgtatgttgtcatgaatgaattgcatgtaccaccagaaagaaaagcggtgctgactgaacggtttcgtcaatcagcagagcgcatggcagaggtgccaggttgtttagagtttttgttcctcacaaacatggaagaaacaggaaagcaaattgtttttacgaaatgggcgtcaaagcaagattatgaaaattggctttccagccctgctttcgctaatgctcattctggcaaatcaaagcaagcaaagcctgccgcttctgctaatgagctttttgcctatgaagtcgcccactatttttgcaaaggcgactaaaacaccacgatcaccattttgtgttaaggagacgaccatgacaaatcggtatttaaccggacatcttccattaatcagcatattgctttttagtttagcgttatcgctatttggccaatcctttgccattggctggcttgaagagaatggcgttcttgccagcatgacagagttgatccgtgaaaacgaaatccgccttggggtcacgattctgtttttattggccttttttatgctattttcggctttaaaattgattgccgatacagtgttttcactgtcattgctgtttttttcaaaagatgaagagggcgcgctttggcaaaaggtacaaggcggcgcctggatttttcttggggcaagcatcctatcccttgctgccgtaaaaatgatctttgccattttgttactatttgttgctgctgcctttagttatttgttgtttgccatttaccgaattgccgactctttgacgattccaggcttaattggttttgtttgttttcagcttttgttttgggccgcgtttttagttaccatcatttatttcgctatccgcctttataattcatttgtcgccagccttcctttataacagcatgaacaagctcgcacacagcaacgaggcgagcttgttttattggacgtttggaaatccttgttgccttaatgcttcatacaaaacaattgcagctgtattggataaattaagggagcggattaaatcggtttgcgggatacggaggcagcgttcagtgtttgcctctgttagatggttaggcaagcctgtcgtttccttgccaaagacaaaaaaatggtcaacctctgtgttacggaaatcaaagtccgtatatggtttagagccaactgtctcaatataatagaaaagcccttctggataagtttcaaacagttcttcaatcgaatcataatagtgaatcgtaacattaggccaataatcgcagccagcccgcttcaacatccggtcttcagtggaaaacccaagcgggcgtattaaatggagcgtcgcattggttcctgcgcatgtgcgggcaatgtttcctgtatttgctggaatttcaggttggtataggacaatatgtaaactcatgaaaagcacctcggtctttactcaaataccgccattatagcatgtatcacattcttttcctagttctctttgccgtcccctaatacaagttgccacagtttaaagccttctagtcaacgacaatgcgaaaaaatttatattggatatctggtgtataagcaggtgaattttggtaagtccaataacgcatgcggctattgactgtttgcgcattgacgagaggttcattgcgcaaatctttcgctacaacaattgcggtatgatcccatctccccgacccatcaaagtcatagcaaatgacatcgccaggcaacaattggcttgctcgttgtttttcctcgccacggagtcccttttgggcgccgcttaaataccagcgaaatgaatgggcaacagaccagcttaaactcatcgattggctgttttcataccaccaaccgtggtgtgtgttgcctttagcagtcattggagcacctccagcatacaggcattgcgatataaaattggtgcaattgtcttcaaagcgcttaaatgcggggttataatcattccaccacctttccgcgtatcggactgcatcacggcggttgtactcacggtgcttttgactttgctcgtctcgcgcccccgcgctttcattttgtgcgtcttgcactggcccttggagcagacggacatcggcacgtagccttccctctgtaaaggttgccctacgtttaaataccctttcttccatatagctgccttcatcttgaacaatcaaccgttcaagcaaaatcgcgtaatcgacttgtgtcacttgttcatgggtgcgtaccgaaatgatgtcccctgaagcttgggaacggacgacttctgccccccttttttccatctctttccgctcttgttcaattgcttttttttcatcatcgtcaaagatggacgcatctcctcttacatacgcttggttcattttctctacacggtcatgaattgcttttacgagtttctttttcatcgccatcctcctctcttccaatcatatggcgttttttaaaaacaatgattgaataattatttattaatatgtataattaaacaaaacgattacggaggcccttctaaatgatacggttcgcacaacaggcagacgccaacgcccttcatcatttattgcaacttgcatttagcaaatatgacaccgaattgaccgatacaccagcccttgcagaaacgccgacctctctaaaagaaaagattgcttcaagtcacaaggcactccttgtcttaaaaaatgggcaaatttcggcaatgtgtttatttcaattcgcaaatcgccgttgccattttatccgtctctgtgtccaccccgcataccaaggtcaagggctgggtactttgcttctgaaagaaatggaacagcatgcgaacgcccaaggttgttcctcaatgtgttgccaagcacggaaagccaactgtgcttactacgaaaaactaggctacagcatttttgggtacaacgctcaatctgacttgtatttgttaaaaaagatgctcaaggaaaggcaaacaaggcagtgtgcataagcacactgcctccagactgtagacaaacgctcgcatacttcgtcgtttgcctcactcatctactcatgaacccccgttctattcgcatcttccctcggctgcactcctcgtctgacaaacgttttctatcagtctgagggcggttatcgactttgtcgacaacctcaaggcagcgtgcataagcacactgccttgttttatgaggatatttttaatgctccttcgaggcctagtaatagttgctttttcgtcaagccgcctccgtaccccaccattgccccattgctgccgattactctatggcatgggatcaatataggaagggggttttgattattggcgcctcccactgcgcgaacggcttttggcgctcctattgcctgggcaatatctttgtacgattttgttttaccatagccaatattttgtagttctttccacacttttagttgaaacggcgtaccgattaaatcgatgtcggcatcaaactcaacacggagaccattaaagtattcgcgcaactgcccacaaatatcaagatcttcattttcgtctaaatgaatccattgaggccggattcccgcttttgacagctttgccgtaacttgtgctttgtttatttcaccaaagtggatttggcaaactcctcgctccgatgcgacaatggacaacaatccaaggggactctccatttctttgacgtacatttgcttaagcgaactcatgccattcccttcttccctgaaaagattaaagccgtctttattattgggacccattctgttttttcaacagatcgagccctttttcgatttcaatttgcacaagctggtccgtttctgtctctttcgcttttagcagcgctttttcctctttttccgacccgccaattttgccaatcgcccaagctgccgtaccacggataacaggccgaggatcagaagcaagcaattcacacagtttcggcaaagcgcttttttccttgtaatgagcaagagcgataatggcattgcgttggatcggctttttgccacgccatgagcctgccatatggccaaactgctctttaaatttacgattgcttatcgacaacaacggctctagtaatggtttgcacagctctggatctggttccatttcttgatggtgatggctgtcgattcctttattatatgggcatactagctggcaggtgtcccacccgtataaataattcccgattttttcccgatactcatcaggcataaatcctttcgtttgcgtttggtacgacaaacaagcctgtgcattcagttccccgggaccaacgagagcgccagttggacacgcatcaatgcattttgtgcatgaaccacataaatcttcaagcggttcatctaacgggaacggcaaggatgttaataagttgccaaggaatacgaagcttccaaattcaggcgtaatcgtaaacgtatttttcgctgaccagcctatgccggcacgttctgccacagctcggtcagataaagcacctgtgtcaaccattcgcaccatttccgtttccccaacccgttcgcgcaaaaatgcctccagtttttttaaacggtcattgaggacggtgtgataatcttgtccccatgacgagcgcgaaaaaacgccacgccttgcccctggaatgcttttaggcgcttttttcatttttgtcggataggcaacggcaatcgagataatcgtacgtgcacttggcaagctcagccgcggatcgacccgttcttccaataccggatgttcaaagcctgaagcatatcctttctcttggtgctcgattaaacggtcttttaatgacagaaatggctcagcagatgcaattcgcagtttatcaacgccgatttcagcgctataagcgagcaaatcagctttcagttgggcgtaatccatgcccttgtctccttttttgcaatacgcttttattgatttaagcaaccgatacgacgataatgaatatatcactttaggaggtcgctatgacgattggtttgctttattcctatcatatcgaaattggcccatcatcacaaatgttaaaaggacgtctccagttttttcaagaattgctgcactttgatttgcaagatgctccgcttaacgcttttgttgcacgagaaaactggccccaaaaagggacgctccatcatgaggccttgtttgactcgcttcaagaaggggacttttttaaaccggtccattcagcagtggacttgactcgtttttttatgcttgagtataaattgccaattacttttcatgacgccgattccctgaaaacaccgttaatggttgatccaaaacgggctactgtttccgaccaattaggcttgatttccagtccagatacggttgctttgcgaacagaagcatcggaaacgacgacaaatggactgcatgttttttactttccgaaccatttacatgaggacaagcgcttgcctttgctccaagcagcgggcagcatgtttacccatgtacatggcggcagcacatcgattcaacttgtggaaagttcgtcatccgatgtttaagaaaatcgcgatcgggtatagtaacggtaggcttaccataaggaggaatcatccatggcacaagaaaaaatccaacaattattaaacaaacaagtagcaacttggagtgttttatatgtgaaattgcataactaccattggtatgtgaagggcccgcacttttttacactccacgagaaatttgaagagttatacaatgaagctggagaaacagtggacgaattggcagaacgcctgcttgccttaaaaggtcaaccggtggcaacaatggatgagtttctgcaactatccgcgataaaagagggcgataaaacgctgtctcctgatgaaatggttcgtgacttagtacgcgattacgaaaaaatttctgatgagcttaaaagcggcattgacacatgtggctctcttggcgacgatgcaacccaagacatgctcattggcttgcaggaaaacatcgaaaaacacgcatggatgcttcgtgcatatacaaaagaaacgtcggacattcgctcttaaaaaagcggcatacaaacgagataatgcgagcgttttgctatagtttaaaagctgccctttggcagctttttttatgtgcaagccccatacgcctcttaatggttcatctccgaataagtgtatgcacatagaaggcgataggtggcttccagtgaagattgatgggtccgttccatcgaatgggaaccttcaatgcctggcccaattaagccatggactaaatcatagcctgccttaatagcagcagatgcatctgagctatagtaaggataaatgtctaatttgtatggaatcgactcttgttggcatagcgaaacaaggtgtgtccgcaatccataatggtacgggccgcttccgtctttcgcacaaatggaaacagtaaattcatcggtttgctggccgtcgccaatggcacccatatcgacggcaacatattcaatcaccttttcgggaatcccagcgtttccgccgaagccaatttcttcattgtttgaaatgaggaaatgggtcgtataaggaagcttgatcttgctgcctgcaagttgtttcattaactgcaaaagcaaggccacactcgctttatcatccaaatggcgcgatttaataaaaccagacggcgtttgctcgaaacgaggagcaaaactaatgaaatctcctacggcaattcctaatgctttcgtgtctttttcatcatggacagcggcatcaattcgcacttcaatattttcttcattccgttttgcagtgtctgcgtccttgtaaacatggacagaagattgatgcatgacaatcgttcctgacaccgtgcttttgtctgatttatggatcaggcaatattccccttcaatggagtgaaacgcgtatccgccaattttgtcaatcgccaatcgcccgttctctttaatgtctttcacgatcgcccctaatgtatcaacatgggcagtgagcattcgctgcttatcattgtttttcccatcaattgtggcaaggagcgcccctttatttaacaattgcgtctggattccgacatcctccaaaaaacgcctaatataggcgatcgcttcgccggtgtaccctgaagggcttggaatgtggaccaagtctttcaaaatggaaatgatcccctggagttctttatcatacattttgtctgttccttctttctatatagccttcctctcatcatagcgactttgctacaaactcgcaattattcaaagttccaatttgcgtgtgagaaaaacagatacacccatgtaaacaaaaaccactactagcgtatcgataagcatttgccacggactcgtctgtgaaaacagtacgattggattgctgtcataaggcacagtggtatttgcttcaaatttaatagaaatatacggataaaaaacccagacaagaacaatatagacagcaataacacctacttttttccagctgcgaggaatgcctaataaaagaaacaacaataaaaatacaactaaaataccgctaatagggctaataaacagcgcccacaaatattcccagccaaacactggcaacatctcaaatccttttatcattcgagtcgcactttctacgcctgatgtccaaagtgtcatcaccaagaacagcgaaaaagcaagcaccatttgaatatattgccaccctaatacagccaatattttgctcgccaacttcacatggatcgagccaggcatggcgtaccaatcatattgggtgcgtttccgccactctttccaaatggcttccacagcgatggctaaacataatacaaacacgaaaacaaaaaacaatgcgcctgccgccgtcaacgcttgtattccaaaaggttcgccaattcgtacttgcaatgcttttagaagaatcacaccagtgaacaaaagcaaaaaaatgatcgtgttcacaggaagcaacataaaaaaattacgtttcagatagaaccaaaatacgttcattttttgcccacctctgcaaacaaatccttgagggactgtcctttctctaagcgccattcctctaaatcagtaataacatctgcttcatcctcgcgtaaaaaaatgacaccatcagcaagcatttctacatcttcatacgcatgggtcgccatgataatcatccgttcttcttccactagaaaatctgttaacacagcaatcatcgcctctttttttgctgtatcaagattagcgagcaattcgtcaataaaaataaaaggcttcggcttagcaagggcaacgattaacgagagcaagtgttgctgcccttttgaaagcgccccccatttagtcccttcttccaatccggcggtcttgcacatttctaacgcacggcgatgctggaacgtctcgtaaaccgctttttggtcatgcaaaatcgtttttacccgtttatggggctcgaaaccaccctcttctgagacataactggctaattgaacacgcgccgctcgcttatgctcgccatcgagggagatgcggccctttccagccggcgcaagtcctgcacacacttttaaaaatgtcgttttgcctgcaccatttgcgcctagaagtacgataaagcgattttttgtcatctctactgataaatttgcaaaaacacgctttcggccatattttttttccagtgattcgaccactagtgcactcatgggtttcccatctcctttaatgaccgttctaaagaggcgctaatttcttgattggaaaaaccgagctttctcatgaatgtaattaacgcttgcatctgcgcatcagccaatgtttccttcagctgtttaatcacggttaaatcggttgttacaaaagtaccttgacccctttttgagaacgtaatttgttcacggtccatttctaaatacgcccgtgaaacagtgtttgggtttacttgcaatcgttgtgccgtttcccggaccgagggcagcttgtctccaggagccaactcgccgctgcatatttgctgataataatattcggcaatctgtgtgtaaatagccttattcggatcaaattgcatgctgcggatcactcccccctcttatttaaatgaaataaagccaggcgagttacgcctggcccagactgtagccaaacgcttgcatccttggcttcgttgctcacctcggctgacaagcgttttctatcagtctgaatttaaacgcccgacttttttattaaagcacatctcgcttttgaaaaacaacatgtgccacaagaagaatcaaggcaatatgggcagctaaaaagccgagtgatgcccacatgtttgcaaacggctccggcatcgtccccaattcatgatagttgctgtaaaaatcaatatgagatagaacaatccacttcgaccattcgtatcttacaataaaaaattgcacaattgagccgaaaaacatcggtaaaaacgtaataatgattgttaaagcggtgctttttgtgaggacagcaatcaatgttgcaagcgccatataaaagacaagcgtcggcaactgataaagggctgtcgcagctgtatcttttgcgatctccaacacagttgcgtctgattggaaaacaagaattcctgttacggttgtgataagaacaagaatcccaaaggcaagccctgccaaaagaaaattgcctgcccatttgcttatcaaaaccttcgtccgcgatgtggggcgaattaacaattgtttgaccgttccatgcgcatgttcgcctgcaatagcgcctgcaatgagaacgaccccataaagcataataaaagttggaaataacatgacgcttatttcagaaaaatcttcggcagcaatcgttatgtcagtgtttgcttggacaagaagagcgatgccaagtgcccctaccatgaagacagccattacaatcgaaaatagccacatttttcgcccgtaccacgactttagccactcattatgaataagaccgatcatgagacatcctccttttgcccttctgttattgaaaaataggcgtcttccaaacgattgcggtaagacatgccatagacattgactcctgctgcaacgagggcattaacaagctttggtatttgctcatacggttgtttttctagttccaacttccctgcgacttcccctacttttccgaagccagcaagcacactttttgcttgctctacaggctctgcttcaatttgaatattaaaagttgccgctttttctttaacagcagtattcattgaaatttgttcgatgacttccccatgtttaatgataatggctttgtcacacaacatttcgatttcgtttagttgatggcttgagacaagcaacgtgacgccgtcttctcgtgcgagccgttgcaaatagtgacgcaaatcacggattcctttcggatcaaggccgtttgtcggctcatcaagaataaggacggaaggcttatgaagcaaagagacggcaatgcccagccgttgcttcataccgagtgaataagatttgacttttttttgcatcgccccttctagctctacaagcgtgaccacctcatcaatccgttcttttgaaacaggagtagcgctcatccgcgcaaagtgctcaagattttgtcgtcctgttaagtagccgtacaaatctggatcttcgacaatggcaccaatatgcgccaacgcctcttcacggttcgtgcgcactgatttcccttctatttccacatctcctgaatcaggggcaattaaggaaacaatcatacgaattgtagttgtcttccctgatccatttggccctaaaaagccataaatcgctccccgttccaattggaatgacatgttttttataatcggctttttcccaagcgatttattaagttcttttacctttaaagggtactccattttctccactcctcaccctatgttctagtgttctatttaaatagtacactaatattaatctggttgcaagaaaaataaaaagctacttctcggcatgtaaccatatacgttcccgcaggtcttctttaaattttaggctctgtgaatttgatacgtttccaaaatgctgttacaataagaacgaacgttctctcccaaagagttgaactgagcaaagtgtttcgttatttaggttttatttcattaacgaagcaagatgtttagatataaaacgtaataaaacaagaaaatttatgattagcggattctagaaggcattggatgacgtagtataaaaaataaggagtacaaagcagtgaatgaattttatcaggcgttaacatatgtaaataaaattttttatgagccaaatcacttaattataaatgctattcaagaagaagcgcaaaactcagattatggagctggtatatttcaactaaattcaaaatcggttagatttagagtcgcaaaaatcacacctaacaagataggacagtttgttgttttttgggaaaaagatcaagccaataaaaatcaagccttttcatatgaaaaggctactgatttattggttatcaatacttttactagtgacaatcattttggccaattcgtatttccgaaagaagttcttgtaaaacaaaatatccttaaaacacccactacaaaaggaaaaatggctattagagtttaccctagatgggaacatcccactagcaaacaagcgcttgaaacacaaaaatggcagttagcatactttatagaggtgaacaatacaaatcgttttccaggacaagaactattaaagctgtattcttaactaattcctaagttggctaattagtaactaacagatgcgttattgaagaagaacaatcaaatttagaagagccacaggtttgatccttttctgatacaccttcaacactgcactagtacatgtcagttgattttttatattcataaggggttttccccatgacttccttaaatacttttctaaacgatttcacgttagggaagccggtttcataggagatctctgtaagcgacttgttcgtagtatcgagcaaatcaattgctttctctagacaaaggatctgcttgtactccgtaaatgtctgccctgtatattcatgaaacatcctggacaaataagcctcagaataaccgcatatgcgggcagtttcggccaaactgatgttttcggtataatgctctttaataaagtctagaatcgtttggattttttgtcgatcggatctgctagtagcaagggaaagctcagctgtttggctaaaatggcgcgccagccagtatttcaactcaatgatccggctttgtgccagaatatagtcatacgtgcccgttgaataatgaaggttgtatatttccataagcagcgttcttagattggacaggacctgctcatccagctgttcttccgaggtgttcaattggataagaacttgttcgctggcaaaaaaagattccggaaaatacagcactagcacgcggttctccgtaagactttgagtggagtgggggacattgctgtttatgaacagcatatccttatccattagagtggtaacttttccttcgtgccagacccgcaagcttccgttaatgcagtaaatcagttccatgttgctgtgaaaatgcattggaataactctttctgtcgtcctcgcctggaaaataaagaggttaatcagctttttacgatcgatttcgatatgttcatacatctttttcattttgccaccccgtcaccaaaccgtgaacatgaacctgcttgtttccttggaactagaaccagtcccttttacctatagtataccgatagtaaaatacgcaaacaagcgtcaatccgtcaaaggcataaacgcaaaaaagaaggcagctccgtccacggtgggatcactgccttctcttacctgcttgtacattcaaaagggagagtcagggtacaaggcaagcccgtaatgatgggtacgtcagaatcattcgcttctgcctcatttatctttatacttccagcaggttcaaatatattgggaacaattaccggctaatcgctgacaagcctatcatggcgtttttgagcgatggaaagtgataagtcactcctcgtctatactttcttgcaagcggtacatgcttaagacagcttcgctgcagtctgactcaaaccgcacgctgcgctcgttcgtatcctctagaaagtaacgcaaagagaatacttcctccccttcattcacaaatagctctatgctggagctttcaataaacatgtgcaattctgcaagcgaatgaccgagcacagctttacggtgttccttctcgttcgtcaaccagttcgttctccagacagtcaaactgttttgctcatgatcatagtcgatctgtacggtgtttctgatgatgagctggaagctgtcaggttgctccataaaccgaataacgacctcagctgctagggaaggcaagctccattgaccgctgttgctaattccttcgtgcacttcatgctgccttaatagctggagctcatgtaacggtctctgatatagcacaccatctgcgaaaacgatttccctcggaagagtcaatgcatgaacccatccttcctcgattgtcgggacagcttgctctgtttcctccgtcattgcgctcatccacccgaacatcaagattcgattgttgaccttgaacgtttgcggggcataaaaatcaaatccccggtcgagctcgttgaagtcagacaacgtaccaagaaatttcccggactctgaaatgcgcccaataatataacctgattgattcggatttttatattgatcgccttcctctggcaagccttgcggggaaaagacaaagacatcatgttcaggaaactggagcacatcaggacattcccacatatatccgaatgaatgctcctgttcgagaaacgatccctggcacgaccagctgatcaagtcttcggacttataaacaagcgcatctcccgttagatcttcccgctgggcccctacgatcaaccaccagttgcctgaatcgtctttccagactttcggatcgcggacatgtctcgtataaccagcaggatgctcgaataacggaccgagtttctggaactggtgcccgtcttcagaaacagccgcgcattgataacttgcccgtgtcccatctttgttgatgacgttacctgtatagaagagataaagctttccttcatgaacaatgcttccgccggaataaatgccgtccttgtcgtaccattccgaaggtaccaatgccgtctctttcctatgccagttcactaggtcatcggaaacaacatgaccccagcttttgtttttatgttcggtgccatagggattccactgataaaaaacatgatactgaccttggaaataggcaagcccgttcgggtcatttaataagccgtgtgtcggcgtaatatgatacttcaagttataagcgtcacttttactcatcatgttcccccgcccgtaaagcgaagttgaacgtcagcggcgtttcttgtgagcttgtgccgatataaacctcaaaatcccccggctcgctctcgaacttcatactggttccgtaaaatttaagcatgtcttcagaaatcgaaaactggacagtccccgtttcgccgctccgcaaaaaaatctgcttgaaatcggccaacatttttattggcctagctacactggcgaattggtcgcggatgtacagctggaccgtttccttcccatcatactttccggtgttggtaacggatacctcgatgtcgactggcttatcggcgctcatttccttgcggctgacggacaggaggctgtagtcaaatgtcgtgtaggattttccgtacccgaacggatatagcggttcattcgtttcatcaatgtaccgtgaggcaaaacggtaaaaaccattttcaggcaagtttggccttcctgttttaagctcgttgtaataaaccggaatttggccaacgctgcgaggaaatgtcatcgccagcttccctgacggattggctgttccgtataggatattggccagcgcttcccctcccattgttcccgggtaccaggcctggatgagggcatcagcttgggccgctacttcggttaaaattaacggacggccgctgtacacgatcacaacaagttttttgttcaattgactgacttcgtgaagcaacttcagttgcggctctggcaatgtaggattcgtgcgggaaccgccttctccgctttggtagatgctttctcccaacgcgagaacaacaacatcagcttcgctagccttgcgaaccgcttcctggagtaacacatcctcatcaaccgtttcaacaggcagtttgtctacatacttgccaagcgcatctctggcataatcaggcaggaggtgtgaacccctgcatacggaaatttgctcaggatccacgtgcttgagcagccctgttttcaaattcaccgtatccctttcatcccccttaatggcccacatgccgagggtagaggtttcctctgcgtacggaccaatcaaagcgatctttgcctgtttcgacaacggcagcagttcttgctcattctttaagagaacaagggattgctctgccaaagaccgggcggccgtcttatgttcgtctgacaagatgcgcgttgccagcagcggacggctttcctttaaaccgcggaatgggtcctcaaacagtcctaagtcgttcttcagctttaagacgcggtacacagcgtcatccagaagctgctgcaattcctcattgccgtttattacgttctccaactgattggcgtaaacggctgtcttcatatcgatatcaacaccggccaccaaagcgagcttggcggctgctgcttcatcttccgcgtaaccatgcatgatcagttcttccacagctgcgtagtctgagatcaggactccgtcaaacttcatttcctgcctgagcaaatcccggttcagccattcgttgcctgtggcggggatgccgttcagcgtattaaaggcagtcatgacaagcttgactcctgcatcgattgcagcctgatagccaggcaaataatattccctaagcatatgctccgacatatctacggcgttatactcccggccggctacaggtgcgccataggcggcaaagtgtttgacacaagcagcaattttgtcggcaggaatgctgttttccccttgtcggccttggatgccgtgtaccatgctttctgcatacttcttagccaacagcgtgtcctcaccagatgactccattacccggccccagcgaggatctctgacgatatcgaccataggggaaaatgttacgtgtacaccttcctcgtaacattcccgggcagcaatcgacgccgcgtgctcaatagactcaaagttccaactacacgtttgggcgaggggaatcggaaagatcgtccgatagccgtagataatatccgccatgaacagtagtgggattttatgattggatttttccagataatcggtttgcagctgaataattttttcggaatcggtcacgttgaggatcgaaccggtgttatatacattataattttgatgcagccccaattttttaagcggtcctgtgacaaccgtatctagatttccttcaaaaaaatcaccagtcaactgtacaagctggccgattttctcttcaacagtaagactgcccaatttctcaagcagctgattattttgcatggttctccccctaatttgtttatttcagatttgttttctctttaaagccaaacatccatgtaagggcaaacgctatcccaaatccaatcacgcagactgcaatgtacggaatgatttgcgcgtttaagtacagcaacatacctggaatgactgtaatcgacatgcctgttgcctgaacatcgaggatccgggcaaagaatccagcaacggcgccaccgatcaagcccatcaggaacggcttgccataacggatattcacaccgaaaatagctggctccgtaatgccgagcaaagcagacaaggaagaagggtaagcaatcgacttcgtcttgaggcttttcgccttcaagccgacagccaacgcggctcccgcttgtgcagcgatcgaaccagagctgattgcattgaccatattccagccggtgtcacttagcatttgaatttcgatcaagtttaaggcatgatgaagccccgtcacaacgataaattgattaatgccaccatagatgaagccgccaattccgaacggcaactgcagaatccatgtaactgctgtcaagattaaaatctctacttcatggaacacaggaccgagcacaaacagtcctagcattagagcgatcagcaatgttaaaaatggcgtcaaaattaaatccaacgcagcgggaacgagtttgcggattcttttctctagcaacgcaccaactataccgataataaacgcaggcaacaccgagccctgataaccggctactttaataaatccaaggaacattagcggttcctgaacattctgggcgacatcccaggacgttggcagggaagggctgacgagcatcaagccgagcacaatcccaagcagcggtgaaccgccaaacacccgaaaggttgaccaacatacgagcacgggcaagaaaccaaaagcagtgtctgtcaaaatttgcgtgaacactaaaaaattgtcggaaatgctgtctggagtaagaccaaaccacgcgaggatggcaggctgcgtaataaggcctctgacacccatgaataagcccgtagcaaccaacgctgggataatcggtacgaatacgtccccgaacacccggatcattcgtttaaagaaatgatcatcttgctcagaagccttctctttcaattccgctttggaagtagaagagacgtcctctccgatcatggcctcatatactcgattgacggtaccggttccaaaaatgatttgatattgcccagaagtaaaaaagacccctttagccttgtccacgttctcaataaattcatcatcaatgatatcccgatccttgacaatcagtctaagtcgtgtggcacagtgtgccatcgatatgatattttcttttccaccaagccctttaattacatcctgggcaatttttttatattccttttcaggccccatctgtctcttcctttcaactaattaagttagcttcctgcttctaagcatatcaagatggcgcttacaatcaacggtattattttacgtgattaagggcaaattttgaccttttgtacttttttgccctgggaagacgggcggaacagcaatatatgtaagctatttctaaattctggacgccacttctgttctttttccatgccatgtataaacataaagtgtattttgtccaaagatattctttataaaccttaaatgatgagtgagttgcaaccagagcatctccatttgcatacgcctttcttcctttttcctcttttttactatataaaaaggcctgtcgacatctcagtaacacagagactatgtcgacaggctgcgtgtgtataaactcttacatttttaaagaaacgtacttgctttcaagaaattcctctaacccttcatggcctccctcacggccaatcccgctttgcttgaaaccaccaaatggcgcctgggcaaccgatggaccgccgtcgtttaaaccgactaccccatagtccagcttttctgcaactcgaatcccgcggcttagatcagtggtaaataagtaggcggcaagcccgtaaatcgtatcgtttgcccgtttgacgacttcttcttctgtcttaaaagtagatatcggtgcgagggggccgaatgtttcctctgacatgcatgccatgtcatccgttactcctgctatgacagttggttcaataaacagcccgttactgctgtttcctcctgttagtacttctgcccctttgtcttttgcatctcgaatatgggtaaggactttatcaactgcatcttcatcaatcagtggaccgatgtctgtctcctcgttcaatccattccccactttcaactgctcgactgcttgcttcattttcgttatgaatgcttcagcaatcgattcatgcacgtagatacgattggcgcatacgcacgtctgtccgccattacggaatttggaggcgattgtttcttggacagcgttatcgatgtcggcatcttcaaacacaaggaccggtgcatgtccgccaagctccaaagaaattttcttaacggtttgccccgcttcactcataagagtgcggccaatttccgtagagccggtaaacgtcaacttgcggacacgctcgtcttcctgccatgcttttgagatgtcacttgttgacccaacaacaacgtggagcacgccttttggcaatcctgctttttcagcaagctctgctagtttcaatgcagtcaatggcgtttgcgatgctggcttgatcagcactgtgcagcctactgccaacgccggtgccactttccgcgtaatcatagcggccgggaagttccacggtgtaatcgcagcgacaacacctacaggctgttttaccacaaataaacgtttatcaggagatgaagccggaatggtttccccgtatatgcgtttgccctcttctgcataccactttataaatgaattggcataggcgattccccctcgcgcttcattaattggtttgccttgttccattgtcattaatcgagctagttcctctttctgttcagcaataagatcgtgccacgcctctaatatggcgcttcgttcataagctgaacgcgctgcccatgcaggcaacgcctcgtaggcgccatcggctgcgacttttgcctccttcgctcctcctttcggcaccgagccgacaacttcgcctgtagccggattcaccacgtcaaatacatccagcccttcgctaacccattcgccatttataaaaagtttcatcttatcgaactcctttgaggcttttttattctgttccctttccctctatatgtaaacgtcgaaaagaggctctgatctagtgaagacagcaccgatattttttcagaaagaattgaattatcgatttaataaatgtatactaaacacatgtatgtaaccgctaccaatttgaatgaggtgccccatgccaactgaattgcctttacgccaactgcaaaacgctttaaagcaccagtttgatgtgtatgaagacgaccatcttggccatctcccactgcgcttcagtgcccattatcagcggcgcgatgaacgttatgtcctttccaagaaagcaacagtctggagcgttgaaaacaaccagcactttttcttttatgagccaaaaacagcaacaatggacacattttctgaatttgtgcgccagcttgatgctcatattcacacaaacgcaaaccattcatctcagcatatgtcgtcgatttacatcggactgctgctaacagcaacagtgccttcgcctgagctgtgtcaagcggcacgccgttgccgtagcttatcattcgtcaaatggggcttgcatggctgggcagaacgctatgcaggaattttgcttcaagacggaagcgagctttacgcgcacaaaaaagggaagccctttattgaaccatttctgcaaatttataaaacgtgaggtggtcttgtgaattttgtgacgcttatgcttatttgcgttgccttgttaattgtcgcctatttcacttatggaaaatacttggagcgtcgcttaaaaattgacggacaacggacaacgcctgcacatacgttctatgacggacaagagtatattccgacgaaaacgcctgtactgcttggccatcatttcacgacaattgcaggcggcggtccgattactgggccaattgccgcgattgtgttcggctggctgcctgccgttctatggattataatcggcagcatttttgtaggcggcacccatgattatgcatctttgcaagcttccattcgccataaagctaagtcgattggcgaagtcattaaagaacatatggggaaacgtgggcagttaatgttcttagccttttcgatagcgacgttaattttgatcattggcgtctttatcattctagttgcaaatacgtttgtgtcctttccaggcgcagccactgcttcccttttgtttattgctgtcgcgatgggtttcggcgttcttgtcaaccaagtgcgcatccatttagcgcttgcaacgttgcttggcgtcgtcgccatggcactatcggtttggattggcctaagctttccaatcacccttagtgctactgcttggtcgctcattttaatcgtttacgcctatttcgcgtccgtgttgcctgtctggtttttgctacaaccccgtgattacttaaattcatttttgctctattttctaattggtggcgcatttttgggtttgttaatcgctaggcctactattcaaatgcctgcctttaccggtttttataatgatacgctcggctttttgtttcccattttgtttattacaattgcatgtggggcgatttccggcttccattcactcgtttcgtcgggaacaacgtccaaacagctgaataacgaaaagaatggccgctttgtcgcttacggttccatgttaatcgaagcatttgttgccatcatcgcgattggttccgttgcttatttaacacttgaccaatttaatgcgcttatggccgaactgaatgatccgattagtgtgttttccgtgggcattggacactttatgaacacgtggggattgcctgtggcagctggtgttacgtttacggcactcgctgcatcggcattcttaatgacaacacttgactcggccacgcggctcatgcgttatgccgttacggaactaggcgaaagcatcaacgtgcagttgcttcgtaataagcatacggcaaccgtactcggcttaataggagcaacgacgcttgccctttccggcacatggcaaagcgtatggccgctgtttggcgccgccaaccaaatgcttggggcgttggctctccttgccattaccttatggcttgtgaaaacaaaatcgaaagcattgtttgtgatcatccctatggtgtttatgtttattgtcaccacatcagcgcttctcgttatgatgcattccaattttcttgccggtgattacttgctcgttggtgcttctttcatcctatttgtgatgtgcgtattcctcggcatcgagggtgcccgcagtgttacaaaacctaaaaacaagcaaaaaccaactgatttaaacgcataaaaagcatggggcgtctgccccatgctgaagttattaacaaagtaagtcgataatgcccttcagactgatagaaaacgcttgtcaaacgtttgaatgctttgctgccaaaaagttaaatggtcttcgtctcaagtgtttgccgggcttccttcgctgcctccaccatcacctttaatgcagccactgtttctggttcttgccgtgttttcaagccgcagtcaggattgacccaaaattgctttggatgtaagacattcagcgcacgctcaatgttacgggcaatttcttctttagccggaacgcgggggctgtgaatgtcatatacaccgaggccaatgcctttgttatacgtgtactcttcgaatgatgaaattagttccccgtggctacgggacatttcgattgaaatgacgtctgcgtcaagcccgtcaatcgcttcgataatatcttggaaatcagaataacacatatgcgtatggatttgcgtttctggctttacttggttgaccgtcaactgaaaggccgttaccgattggtcaagatagctttgccatttcgcgcgcttaagcggcaatccttcccgcaaagcaggttcatctacttgaatgacgccaattccatgtttttcaagggcaaggacttctttgcgcaaagcgagagcaatttgattaaccgcctccccttccgtaatatcagcccttggaaacgaccaattgtaaatcgtgactggaccagttagcatccccttaaccggtttgtctgttttggattgggcataaaccgtttcttttacagtcattggttgtttaaagtaaacatctccgtaaataattggcggtttgacacaacgtgacccataagactgaacccagccatatgtagtaaactggaagccgccaagcttttcgccaaaaaattcaaccatgtctgtccgttcaaattcgccatggacaaggacgtcgagcccaagctgttcttggatagcgatccagcggtctatctcggcgttaatgaatgtttcatagccagcactgtccaattttcctttgcgccagtctaaccgttttttacggatctcttttgtttgtggaaaactgccaatcgtcgtcgtcggcaacagcggcagtttcagtttggccgcttgcaacttggcacgcgtaggtgcgtctagaccacgggatgggtcctcgctgctgatttgtgctacttcttgttggaccgattgattgttccgggcttctgaagcatttaatcgccctaacgcgtgtttgctcgcttctaataacgaaggtggctcgtgaccgttgaccactttcgccaatgaaacgatctcgattattttttcatccgcaaatgcaatcgcttcttttaattcatctgctattttctcttctgattggaccgtaactggcacatgcaaaaggctagatgatggttggagaatgagcctttcccgttcaactacctgtaacacttcctctagttcggcattgacagctgtaagatccgtccgccaaatgttacgtccatcaataacgccaagtgctaacagcttatcgtttggaaatccgtttacacgaagattttgcaatgtttcttcttttccagctacaaagtcaaatcctagccccgcaactggcagctgtataaaacggttatagtcagcgacgctctcaaaataggtttgcagcaaaagcttggcgtttggcgctagtttcgctaatgactgatacgtttcctcgacaacagcccactctgcttcggtcacatcgccagccaaaatcggttcatctacttgaatcaatggcgcgcctgcctgtgccaattcagcaagtacttgtccgtacaaaggcacaagtgtctgcacatgttcggagaaggatttatttccatattgttttgctagtttcacaaaactgactggcccaagaagtaccggtttgccgttaatgccaagttcactttttgcctcttcgtacaaacgtagccagcggttatcgacaagggctggttctctgctagccgttaactctgggacaatatagtgatagttggtgttgaaccactttgtcatttcggctgcgacagcatcatccgttccccgggcaatcgcaaaatacgtttcctcctccacttttccgccagcatacgcaaatctttctggcacaattccgaaagcaacagccgtgtctagcacatggtcataatcactaaaatcgcctactggaatgagatcaaggccgagctgttgctgtttttgcaaataagatagccttaacgatttctgttcctgcaaaaaatcagtttttgagcgctttcctgcccaaaacgcctcaaggttttttttccattctcgctggccgccaatccgcggataccctaatgatgaacttctcactttgctcaaatttctccaccccttcatgtttttatcatcgacaaacaaaaaatccccattacgtaattaaaagggatttggaaagttagccaattgttaactcgtgcctcgacacaaacattccattggctttgttatccactcctctctatatccacgtagagtcaagcagtacaaacaggcaggcaatctgacttcacgaataaatgttgcatctcgtgtcacagtggcgggaccgtcctggattttcaccagcttccccttttaagcggcaatagccgcacctggttgcatctataaaattgaaaaacacccgttccgggattggaaagggtgttgttttcacgaaatgaatccccttatctgccaaagttccctttgctggatttagcaccttttcatcgcaatgaatggttgctgaagcttcattgggccagtccctccgcttctcgttataagagtgtttttatgaaaatgtgttgttcatactgtagcatgagttttcatagttgtcaaaacaaaaatagaatccatttttattgcaaaatgtgacacgattctcgtaaactataaaaacgcaaacgaatatttttaaaagcaggtgatcgttttttgaaatcaaagtcgtattctcaggcaaacaaaattggtctcgtgcttggcccgattctggctttgcttgcttttttgctcatcccagacgatgccattggctatgaagggcgcgttgtccttgccacagtcgcattagtcggcactttgtgggtaactgaggcagttccaatggctgctgcttccttaataccgcttattatcatccccttatttggcggtgcaccgattgacgttgtatcgagtggctattcggaacctgtaattttcatgtatttaggcggctttattctcgcaattgcgattgaaaagtggaatttacataggcgaatggctttatccattattgattttattggaacagaaagccacaaaatcattttgggcattatgttggcgacaggcacgcttacgctattcatttcaaatgccgctaccgctcttatgatgttgcctgttgcccttgctcttatttctgaagttcgcgaaaaacacattttaaccggggaaaacgtacactattttgctaaagcgattttgttagcggttgcatacacagccacgattggcgggcttgccactttagttgctgccgtgcccaatgcggcccttgccggtattgctagcattcagtttggtattgaagtcactttcttgcaatggcttattttcgctggccctgttgcagtggtaatgtttatttgcctctatttctatttgacaaaaatccggtttaaagtcaaagtcaagcaacaacgctctgtcggatttattaaggaagaaaagaaaaaactagggcctattcaaacggaggaatggatcgtcattgtcgtatttcttatcaccattttcctctgggtcggaaaacccggtattctttggctagcaaacaccttctcagccttgtcgtttctcgataacctcggaaacttgcctgatgcaagtgtttcgatgttaggagcgatctcactcttctttttaccaagcactaaacagggtgaacggattttaaaatgggaggacttagcaaaactgccatggggcgttctcattttatttggaggcgggcttgccttagcgaaaagccttgaatcgtcaggcgtaaacgactggattgccgtagcgttagaaggacttgaaaaatacgcggcctttattgtgattcttttgctagtagtcattgtactggcgatgactgagattttatcgaataccgctgtcgccaatttggtgctgccaattgcggccgggttaggagtggctattggcatggatcccctctttatgatggctgctgttgcgctcgctgcaggctcttgttacatgcttcctgtggcaacaccccctaatacggccgtcttcagcgcaggtgaactggatatagccgacatggttaaagcaggcgtatggctaaacattcttagtgtcattgttattacactggccgtctacttttggatgcctgtagtcttcggaatttcaagataacaatccacataatccattaaacgagtagagaacgcttattagccgaaggaagaacgagagcgttttgctacaaactgatgcccatgctctagagtgtgggtttttttatgccgatcacgcactcatctttcctatgtcccaacatttccccaggcaaacacctttttttctttgtggaatctgttaaaataggagagttgattgataaggaggaacatcgatgcctaaacgaaacgatctgtgcccatgcgggagcggaaaaaaatataaaaaatgctgtatgaatcgctcatctagccaggcgatggtcgtacaagacgaactaaaccagcttgaaaccgaattgctttacatggcatttacccgctatcaaaaacagttaacaaattgggtgcaaagctaccattccgtttatcctgaggctgataaaacggtgactgaaacactttcaagcatgttgcttgtttggttgatttttacaaagcccattcaagaggatgagacaacgatttttgatgttttttatgaagggaaaaagagaaagatcaaacgcccaaaaactgctttcctgttggaaacttggaaacacacgcgcccagctgttcttgaaattaaacagcaaatggctgagcgtttgtacagaagcgtcgatttgttaacgggacagcagatctaccatacattgccaactgaacatgagaagactgcacgaacaggctccactgtcatcggctttccggcaaaatctgatgcgcacatgtcctttattggtcctgttattagccatttgcctgaaaaaacggctgctattaaacaaaaagtcgcttcgtttgtaaacgaaacagaagacgcctttttgcagaagtggccgcagctgttgtccgcccttttaaatagcgaacaggctccaacagttgctcctgatcagtttcgctggcatacagacaaacaaaaggaaacagccgaagcattgatcaatggcctccgccttgatcgatgcccgccggaaattgaaatgcttgccttagagaaatggaaccagttttgccaggaacagaatccggcaatccgcaagccagcagcgtacgctgctgcgatggaatacgcccttcaaacaattgcgcctatttctgctacacaaaaggcacttgctaaaaagtatggtgttagcccatcaacaatttccgctcgctctgcagaaattgtgactgtgctaaaagaaacagcaacggcctaatggctgaacagccaaagtcttcgctttggctgttcgattctcgtttacgcgccttgcgcttttgttatcgtctagcttcaggcgccatcagatcgaggcgcttttgttaaaaggagggatttgatgcgtaagggttcttcgctgctcactgtatgcgtaactgtgttttttatcattgtcatctcagcagcggttctcgcattcatctttggtatatattatttagggatggccggtttgttccaactgctaggcatcggctatgactctgttcaagctttagctttgtttgtcttgctttttttgctgctcggcatttttgttgaattgtttgttaaagtgttcaatacgttgcttctccctgctgtcgcaagcagactgcttcagaaaatactagaattttgcataaggtatacattcacacttcctgttgtttttttgcttaactactatatgtctaccatccatattaaactgatgtcgcaagcagcccttgctgcgtttgtcgtcgtaatagagatgctcattgacaatgaggattacagccaaaaaggccgatagaagtttgcttaccgataggtgcttgcccttaggcaggtgatctattttgtttaatagacggaatattatgattttaaacccgcttttctacttcctatactagtacgtccctcttatttttagcgtaacttttacaatctattacattataaaacactattaagcggttttttctgctatgatttgagtaggcccatttggtgctgatcatcttttaaggaggaacaatatgccggtacgaaaatcaatgcgacacatgattctgcttgtttttactctattcgtctgtttaaccgtcccacaatccgcttctggagaaacaggtgaaaaaacacttcatatcattcatacgaatgatatccatgctagctttgacgagtacgggaaagtagcagcttacatacagaacaagcggcaatcgtccgaccattttctgtatgtcgatgccggcgattttgcgagcggcaatcctgtcgtcgatttaaacaacggaaagccaatgattgatgtatttaaccttgctggcttagatgcgttcactattggcaatcatgagtttgactacggacaagaccatttaaaaacgaacatggaacaggcagactttccttggcttgcggccaaccttgatacaggggcgacgggtgtcgaaaatacgaaaccttatgtgttaatagatgcagatggcatctccgttgcattatttagcttaacgcaagcgccgccagcaactgcaccagcaaatgtagttggtatggaattcgataatgattatattggaacagcacttgcttataaggacgagctagaaagtcaagctgatgtcattattgctctaactcacatcggctacgatcaagaccgccgccttgcaaatgaagtcgagtattttgatgcgattataggcggccattctcatacgacgttaaacgctcctgctgttgtaaacggcacgccaattgtccaaacgggttccaatttgcaacacattggtgaactcgatttcacctacaatgagacaactaatgaagtaaccaaagtttcaggccagcttactgcggtctcctccttaacagaaacagacgaagacgtccaagcagttattgacaagcacaacgaagagatggatgagcttctcggcaaagtaatcggctattcaaacaccgggctatcccgtgacggacgctatgatcgcgatgctcctctcggcaatttttggacagatgccatgcgcgcttttgccgatgcagatattgccctaacgaataatggcggcatccgcgacagcattgcccctggcgaagtgacattaaacgacatctataaaattgagccttttgccaacgagatcatggtaattgaaatgacaggcgaagcgattgaaaacgtcatcgcttattcatacgcccgtgatgatcgcaaccaaatcgatttgcaaacatcaggactgcactacgaaatcataacaggaatgacaggcaactttattgacgtgaacgtatctatcgatggccagccacttgaggcagattccacttataaagtcgcagttgctgactatattggtactggcggatcaggctaccattttgaaggcgaaatcttacaagaaacagtaggcctaatgacgacggcaatggaacaatatgctttggaacgtacggctgcaggccaagcgcttgactatgaaagcgaggggcggattgctttaaaagtggatccaactgcgccaaatccaggggaaatcatcggctcgacgaacactggcctttattctgaaaacaaaaacaaacaagatgttggccttggcaacttatacgccgattcaattcgagctaaaacaggcagcgactttgcgctattaaacagttcttccatcactggagaaattcctccaggctcgattacagacaaacaaattgaagctcttgaccgttatggcaacaccattgttgtagtcgaaacgacaggttcccgcctaaaagaagttttgctcgaacaatcacgttaccatcgaggcgttgatttgcaaggttcgggcttgacttacacgctcattccagacgagaacagcatctttaacgatgtgactatactacttgaaaacggcgaaccacttgaccttaatggaacgtatactgtcgcttataacgactatatgcatgcctcaaccttttacaaccttggcacggctattgataacagctacggccctgtttggcaagctgtcgttgattatgtatctacgcaaacagagccaatcgattatacagaaggaagccgcattgccattgaaggcaaagagccggaagaccctactggcacactgactgtcgcagaagcaatcgccaacaactcaggcacaaaggcagtcaagggctacattgtcgggtcgatcaataacaaccgacctattatcggtgaaggaagccacgccccttctaacttgttattggcagactcaccagatgagacagacagggcgaagatgttgcctgttcagcttgtgaacggcacgcctgtccgaaatgggctaaacttagtcaacaatcctgaaaacattggcaaacaagtacggataacaggttcgctagaaacttattttggaacgccaggcatgagaaatccatcaacatacggttttatcgaagaaccagttgaaccagaccccgagctgccagcatgcgattataaagcgtgggacaaaactgccatttatacagctggcgaccgcgtcgagcatgaaggcgatttttatgaagccaaatggtggacacaaggagaaaatcctgctgcttcaggaaggtgggacgtctggaaaaaagcaactgattgctatgaggagcctgatggaccacaagaatggcaggcagatgaaatctacactgccggtgatcgtgtctactatgaaggccagctgtacgaagccaaatggtggacgcaaggtgagaatccgagtgaatcgggacagtgggatgtttggaaaaaagtaagcaactaacacaaaaaagtcgggagcactcccgacttttttgtttatagcgattcattcatgatacagtgatggatgtctcaatgcttgaacgttttacttttaggctgctttcgtcgcttgttctctcgctagcgaggcttcttgcttttgttcacggaaaccgatatagacaaagaacaacgcaattaaggcatagccaatcgtatagtcgaaagcggcattaagagcgagtgaaggggcatgtgtaaagccaaagaacgcaaggacagcgccgatcccggcaaaaagcgccgctttgtggaacgttcgatcaatgaggcacacggtaatagcgccaatgattatggctgtaaacattgctccttgacctagaggcacaatcccttcagaaatgcctgccaccacttcccctgcgctattgttaaaacgtgtcatcatgtagttggcgatataaggaagcatggctaaagcaaccgccggatagtacttcttctcgttgttggcaaaagtactcgatatcatcgacatgccgacaaagacaagaatcggcgcaatcgccgccatcggaataagggccgaaaaagcagcgataagaccagttgctgctgcaaataagaacatcaccgcatttaagatgctgtatccccgacctgctcccatttctttagcgcctactgttgcaatatacacagttgtcgggaacatacctccaaaacaagcgccaagcatcgcgccaacgccatctactgcttggcattcacgaacatcatacgagtcgcccgctgccgccattgcatcaacattgttcatcgtttcaatcgcattgtaaatcgtaataggaatgaggatgccgagcaaaccgatcatcacgccaaataaagcggacatgccttcgaacgctgccaacgttggcaaaaatggatagaaaccaacattggcaaacgcgtttccaacgtctgaactagattggtagcctagtgcaaacgctagtataacgccaataatgatcgcaaaaagggacgtaggaatgcgaaacggcatcccgacttttgccacaaagccaagcaaaatgatcgacaaggccacaaggccaatgacaggcacatcaaaaacagaaaacaacatttccccggcaacaaacgtaaacgccacccctgctaatgcgcctaataacgccggacgcggcgtgtgctttctgacccaattgccaaaaaaagcaacaagcgcttcaacaaggcctgataagaaagcagcagctacagctattttccaggctagttcgtagtcgtttgtcatcgccaaagccggagcggtaacaccgaatagaaacacaaacatgacaggcgtggacacgccataagataacgccgttacatctgtacgattttcttttttcgctagccgtttggccatgtgtgcataatagaggtttccggcaataacagcgacagccacgccaggaataattcgcccgaagacaagagactctggaaatcccatccccagtaaggtaaccgttatgacaacaaagtttgcgagattgttttgaaaaagagcaaaaaaagcatcaatgtcttgttttttaaataaaggataatggccattcataaattgtatattccgccctttttaagatttgttgtaagcaaaatgtgccgattcttctacaaactgaaccttgttgccttctagtgaagaaatgcgcgccagcgattcaatccgataaccttttccttcaagcaacgcccttccatcttggaaagacttttcgatcactatgccgatcccggctacagtggcacctgcttcttcaacaatttgcgtgagtcctgtagcagcttgtccgtttgcaaggaaatcatcaatgattaacacacggtcaccggggcaaagccaatcctttgaaacggtcacctctgaatattcctttttagtaaaagagtacacacgactcgaataaacgttttctttgtccatcgtcactgatttcttctttctagcaaaaatcaatggcacttgaagagaatgggcacacataaagcttggagcgataccagacgactcgatggtcacgactttcgttacatgttcatccacaaataggcgggcaaattcctcgccaattgcgctcatcaagttggtatcgacttggtggtttaaaaattggtcaactttaagcacgccactcgacaacacacttccccgcttacggatcgcttcttttagtaattccattgctttctcctttcaaaataaaaagccgaaagatcactataaaaatagagtgatctttcggctttgaaaataacaactgaaaaagaccactcgtagtcaggccgttatcggcagcctggtagagactcgcggaccatattaccgctattatacgagctgatgctttgttcgtttatttagtttcccttgcctattataaagaatctaaccaaaaataaaaagaggtttgtggcaaattagccagaattacttttcccattttattgcagtcggtttcaagcagctcctacattcaaaatcgactgtcaacgtatggattgtcgtttccgaatgacaatgaggacacgtgaccgtttgcacacgcaacaacgataagcccacacaaataatcgaaactgccaaaatgagaaaggcctgcaccatgcttttcgcttctaaagaagcaatcgctattccggcaacgacaccggcaatgcctataaagcctatggccactttccctatttttaatggcaatggactttttttgcggaccaacacaaccgtttctttatccattaaacagccttctttctattcgttcgttttttatatgttaactgtaccatattgctataggaagccaaagcgttatcttaaacactgttctaccatttgccactacagccggcttctttcatcttctaataaaccaaagacaaacgagtcacgccagccatcgctcagccgcaaatgatcccgcaagcgcccttcctgctgcatcccgaccttctttaatactttggcagaagcaatgttacgagaatcgcatgtagcccatatgcggtggagtttaagccggttaaatccatcgtctatcaggcatgtagctgcctctgttgctacgccttgtccccaataatcaggatggacaatgtagccaatcgcgccgctgctgttagcactgtcgataactaactcagcggccccgaccacgcgctccctatttttcagagcaattgcaaatgcaaacctcgtccgaggacatttgcgagcatcggcaatcgcttgtttaacatagttttgtgaatcattttcgttattagggccccatgtctggtaccggcagacttgttcaagcgaggcatatgcatggacgtcatgccaatcatcaattttaaactcacgcaaatagacatttttccccttcattgctgtctgcctccctttaacgatgatcgactgtcgtcattgctttccaagtctaaagcaattaacgttttttcattcatttttatattttaactgtaacataattccaaaatgagctgaagttttatcttagcatcgctccaacatttgctcctactatcggctttcttcatcttctaatgaaccaaaaagcagcgagtcccgccatcccaatgtgtcatcggggcagatattttcgactaaagtatttaaatttttttggttcctagtttgtttatttgaatgttccttctcttaatagaataagcaagaaaacaaactagtaaggagttgttatttcttgaatattgacaatcaaattgtagatgctgaaggaagaaagcggtttattgaaatgttgcaaaagcaattaattcgggaaaatccaagtgctcttcctatttatggagttgatggacagtttggatccgagacgagaaattgggtcaaccgtttccaagaacgaaaagggctaaaggtagatgggattgctggacctgaaacacttggtcgccttcgtgaagatattgtgcaacgtcccgatactagtggaagttgtgttgaaattcttcaagaagacttgctttggttttttattcaacaaagtgctattgatgggcaatacggtccaggcactacccaaggcgtgagggactttcaattcttaaataatttagtagttgatggtgtggcaggaccaaatacattaaaaaagatggacgaattaatcacatcaattttaactcaaaaaggagattcaggaagtctggttctacgtattcaaaaccaactgaatgatcagggtgaagctgatatatcaattgaagtggatggagagtttggtccagagacagaggaagctgtaagagtatttcaagatgctacagagcaacgagtcgatggtattgcgggaccagttactatgaacttattggatttagaagcattacatccaacatcaccagaaaccattcagcagtttcttctagacaatggcattcggatatcgactgctagtcagaatcaagatattacacaaaagcttacagatttacttgctttagactctgcatttaaaaacaacgtcccttccggtgctgataatgaactatcatctgtagcagtttcactaatgacgattgaggcagtagatgaggataaggaggttcaattatatcatttgactgctagtttagatgaaaaaaatcagtatattaacgtccaagctgtttttaaccttgatgaaaagcttgaacaatttgcttttattgtaatagaaggagatctttatgaaagtaacgcaaggttaatgtattacgatgaagagggaaatcttattgatcaactgagtgatactctattagaacttaccaatgccgatcttgatgttcaaaaagatataactggagttatttcgggtatacaagctcaaagcgcgatgcatacgttctgtgattggacagcaactctattacctggaactgtgtgtggattggcgttagctgcatttggaacaggaattggagccgttgtgggaagtgtggtttgtggaaaaattggcggtgatattatgtatgacgaatgggagtgtgatcaatacatagaggactaaaataaaaaagtatggaaactcttgaaaaaggtttccatacttttgtgttttgaaacgaggagaagtctaaaaaaaggggattgtatttatgttagtactaaaggttgtattaattatagctgttctgtttcctgttttcacagcaacatatgattattttttcaatgatatcattccttcagctggaaacatattgagtgatcttctaaaaggcactctcttgggattaattgtaggtttagttctaaatgtattcaaaaacagaaagtaagcgttaggtctgttttattatgtgaaataagcttcctaaaaaaggaacttggttagaatggagttgacagaccacttggatagggcaaatacaggacgtggcgacagacatgtaccttcccgacgtcttcccgtgccacacggattgtaggctttacattgagaagcccgacgtgatcgcttttcgttagaagcgatttatccttcgtaccctatcagcacgtagagaggttccacgtcaagccacgtccccccgctctaatttttatgaagtaaagggaaaagactgaattgctagtgaaaggtctgtaattacccctgtttaaagtttccgatatcaatgcctccactagtcattctttccctttaacatggttgcctccctttaacgatgatcgactgttatcgatcgactcgtttaaaccaatcaaccacctgctggcttataccacttcttgaaccgttccagttcatttacggtgcaacggacattagggaagttgctcatttttttaatcaaacggacactgtcgacgttataaacatcaattgcacgccttcacgactgcactgctccgcgaattttctactgaaatggcggatgtgaatagctagagaggaagcgttaattgtcttcatatatggaaacaatgctttcgttggcttcgtttgaataaggccaagctcaagtgctggagaaagttcccgcatccttccaatggaggcatggttaaatgaattgatataaacatcctgctccaagttatagtctttaatcaattggtatacagcttgctcaatgccattgtcgccgtttttgtctttctttagctcaatcgccattttgcagcggcccgcaaaagcagcaaacacttcttttaatgtagaaagtcgttctttttcatagaccgttaactcttttaacgcagcaagagagtaatcttttacataccccttgccattcgtcacccggtcgacttttgggtcgtggataatcagcggtacgccatctttcgtaagcctcacgtccatttcaatccaataataacctaaacggattgccgcttcgaatgcagacagcgtgttttctgggtatttgcacgaatagccacgatgggcaatcgctttaatcattcagtcaccacctcgcctgtttcctcgactgtgaactacccaacacttcccaccctttcgagttgctagaagtgggggccttcttggataatcgccacttttgacggctagcgaaatcgaccaagcgatattcgtcttcccttacgttagactgtcacacacttgaagagggagacttctttcaaacaatgttaaatcgagaaagtatattttacaaggaaaaggaagtcacttaaaaacataaacttaaaaataaacccttcacacataagaattattacgatataatcaaatttgctcttataaatcgtaaacattacgcttaaaaaaaggagagactgatgagaaaatatttgatggtagccagcgcatccttgcttgcgttaggcgcttgccagccggcagacgaaagccagtctggtccttctgaagaagatacaatcactgtgtacacaacgatttttccttatgaagattggacgaaaaaaattggtggtgaatttgtagaggtcgaaaacatcgttcctgtaggcgctgacgcccatacatatgagccgacgccacaaacgatgatcgacgtcgctgaagccgatgctttcatttacaacggtgcaagtctagaagcttttgccgataagattacttctgccgttgaagaccacgatgttgttacattagaggcttctgctgccacggatctaattgctaattcacacgaccacgaccatgggcatgatcatgacgaccataatcatgaagctgaggatgagcatgatcaccacaaccatgaaggggaagatggacatgaccatgaccaccatgacaatgaaggagaagcaggggatatcgctacagccacaattgacgggcttgccgaccattaccactctggcgacacagttgaattgacagcgcaatctcctgaaaacagtgaccattggcattggtatacccttgcagctggtggagatgctgctgatccagatgcttgggaagtcgtacctgataaccattccgatgtttatactggtacagcggaagaagacggcatccaaatcatcgctagacaatttgacgacgaccaccatatcattgccgaaagtgagccggtaacgattcaaattgacgatcatgaggaggaaggcggctcacacgatggccatcatcacggagaccaagatccccacgtctggcttgaccccattcgttcaattgagatggcagaagcgattaaagacatgctcgttgagctaaagcctgagcaagaagcctattttaatgacaactttgaaacattaaaggcgcagttcgaagagcttgatacacagatgcaagaaatggttaacgatgcttcagtcgatacattcattgtttctcatgctggttacggctattgggaagaacgttatggcattaaacaaatcgggatagcaggtatttcctcgacagatgaaccatcgcaaacccaacttgttgaaacggtagaaacagcaaaagaacttggtttacattacgtagtctttgagccgaatattacgccttccgttgctaaagtggtgcaagaccaccttggcgcagaagcactgacgattcatccccttgaagcccttacacaagatgatgaacaagctgacgcggattatttctcgattatggagaacaacattgaaactttgcgcacagctcttaacaattaaaggctgtatgcaataaacaccaaaagcgccggaaaaatccaggcgcttttttcgtgttactgatttgaatggtttttcccttgatggtgcaccatatcaaggacaatcattaaggcaatgcctattgtctcatggcgttgatcgtgaatcgttaaatggtatgtatctccccagctcaaccattgtttctcgacgttcataatttctttgccatccccgaccacacgataatgatggtccaacaaactgccctctatcgtccaatcaagggggttaatttcatatttggcacgaaagaaagtaagtttctttgttacgtggcacagttctttttcttcattcgaaatcgtgtaatgaggcaaaaacgaaaacaatttctctttaatttgcaagactggctccccatctacggttgtgatcgccaattggttagcaaaggaaaacaatttgccgtccactttgtatagcggtttctcattgccgtcaaataccgtgaactgatctttaaaggagaaaatacgttgttttacataataatccattattcactcgccactccctttcccctatccatagcataacataattaaaaaagggtttcgttgtccatttggcataggtgaatatcgatagttaccggggtaagccgctaacaacgggataagcgacaaacactcggatacttgcctcttgacgctgtgtttgcgataataaaaccagttttaatacttttataaaggatcctatgccatgaatattttggtgacccttaacgcccattacttaaagcctttacaagtcatgttgacatcgttatttatgaataatgcaaacgaagactttgccatttacttaatccattcgtccattccagaaaaccagcttcaacagctggagcaatttgtgtgccaacaagggcattcattgatcactgtagaaacggacaaaacgctatttgccaatgcgcctgtcgtcaaacattattcctctgaaatgtattaccgtttgttggcctatcgatttcttccgacggagcttgaccgcattttatacttggatcccgatattttggtgttaaacccgattcgccctctgtatgaaaccaatatcgattcctgtttgtatgcagcggcacagcatagctttattaacatccaagaaatcaataagtttagactaaatgcgtatgaaatggaagcatactacaattcaggcgtcctccttatgaatttagccaagcaacgggaaaccatggacataaacgacatttttgcctatgtcgaaaaatacaggaatcgtctcgtccttcctgatcaagatgtattaaacgcactctattctcctcagatcaaaaatgtcgatgaacgtctttataattatgatgctcgttattaccgctactacaaactaaaaagtggtggccgttttgacattgacgccgtactgcggcaaacagtcatactccacttttgcggaaaaaagaaaccatggcataaaaattacaatggcaagtttcattccctttataagcattacgaaaaacaggcatttcctaaataactcactaggcttttgaacgtggccaatggtattctctccctatgatcggtaaacaacgctctccttcctttctttttagacgagagcgttgtttgctttaagcttcatagttatacttactggcttcttcgttccattagattaattcctagtcccattgcgataattccaatcaacaccataaccaacaatgacatgcccacatcctgaaagccagcattataaaagatgacagccataatggcgtccatcgcatgtgtcagcggaaataaatcggcaataaacagcaacacagagtttgtaatcgtcccaggcatcatatatgccccactaattagcggtataatgggaataagcgaagggtaaatcgccaaaaattgctccggcgttcttacaaaaccggtaataagcatcgccacgctaatcatgctaaaagtaaaaaatgcagcgatcaaaacgacaagccctagttggtctcctatttcataatttaagccatacttaaacacgatcagcacgacgcaaatttgaaacatggttattaaaaaactatataagagatgactgctgtacatattggttttgcttatcggcgacaaaatcattcggttccatacgccagaaactttatcgtacatcacattgtttactttaaaaccggcaataaacatggaaactaaaaaagtaaaagcaaacaataactgcgtgcttatgttatactcaaccgtttcctcacggtcaatgccttgagcctctagttgaaaaggggcatccgccaaataccgctcaaacgcctcgcggctacttccagcttgagacgaaatcgccctaccgtatgcctcctgttgaaagactttatcaacatgctgctgaacaatagcgacactaggcagttcgccagcggcaatgagtttataatctgattccattagctttacggctacatcgagttgaccagctcgtatgtcctcccgggcttgctcaggatcaacgatgataaactggaatgcatcatccccgttcaacaatttctcccattttttctcaatacttgaggcattctgctcctcactaaaaatagcgactgttgtcggcgaatgaacaccgccagtaaataagagcgtagcaaggatgctgccagccattaataataatagcaaaagtgggtttcgcttatctttcataaattgcgcccatagtactggtttcactgcgcttcccccctttttggataaaaggctaaaccagcgatactacataatacaaagaatatgatcaacaagacacttgggccaactagcgacgttccttgttcgaaccggatccagtctgtaaacatgactaatgcaagaccatttggtgtccattcaccaatttgttgcaaccaatcaggcaaaatgtaaattggaacaaaattgcctcctacgacaccaaacagtataatgacaagcataaataggccattggcagcctccaccttcttcattctcagcaaaatggtggtaaatatagcagctaagccggcaattgcgaaagagaccgaggtaacgattcctaagagtcctaaccaaaaattcgccgttcgctcagggaatacgccaagaatgaaatgggccaacgtaaagacaagcatgatttgcagccaagccaagcaaaaagttgagactgtttttccaactagaaacagcaatcgattttgatgcgcgataaggatacgattaaatacttgttgcctcatttccagccctgtttttgtagcgaccgtttccgcagtaaataaagcaaacaatatggccatcgtaatcgtgaaatattgcgttaatgaaaagttctgccctgcttcctcctgttcaaagcctccttcaggaagcttcacctctacttcagtagcgccggagagggtttccaaagcaaagtggtaatttaaatgatccataaagccgtgtatgatattgtataatgcactagtatcactcgtttctttttccctcttaaacgtcaacgtcgtagccggagattctcctgttaccgcggcatataaactgtctacagtaaagccatcgggtatgagaacaaagccatctatctccccctcttcaaccttttcgactgcctccgcctcctctagttcgtaaacagtcacccactcttttaagtcgtcgctttcgaaatagtcgacaagtacttgcactggacgcacttcacttgttcgtcgaactaggtcttgcgcttcttgttctgccaatgaagcatcatgaagcaatttttcctttaattgtgctgatgcttctgtttcatcatcctgattgacgatcgctacatgtaaatcaatcgtttcctcatcgtttccaagcaacccagaaaaagcaaaattgagcacaactactaatagaatcggcagcaccagcacagtaatcagttctttccgatcacgccaaaacgtaagcaagtctttttttatataacttcgcatagtggcctcccttaatcccgtagcctacgtccagttaagtgaagaaacacatcctccaaacttggcgtttccgtatgaaaattaatgatttgaatacgatgctgttcagcaagatgaacgagctcactaattaaattgcttcctttttttgcaatcatcttcaactccacatgagagccctctacttcgcgaataccattcagcgcttttacttgttcaacaaaaccgggttcgcctttactaagctccactttgatcgtgtcctctgttgataaaatgctaagcagctcagcctttgtacctgaagcaatgacttccccatgatccataatgtataaccggtcacaaagttgctccacttcctccatataatgactcgtgtataaaaccgttgttcccttcttttcatttagcatgcgcaccgtttccaaaatatgatttctcgattgggggtcaatgccgacagtaggctcatctagtatgaggatttggggttgatgcaacaaggctgcggcaatattcattcttcgtttcatcccaccagaaaacgttctcaccaattctttgcggcgatcggctaatccaacaatttctaacgcttgttggattcttccttctaggtctttgtttctgattttatagatggaaccaaaaaatttaagattttcatatgccgacaactcttcgtataacgctaattcctgtggcacaattcctaatacctttctcatctcgcctggtttatctacaacatttattccctttagcctaatttcaccggctgtaggcttgattaatgtggatatcatggaaatggtagtcgatttccctgccccatttgggcctattaaaccaaccgattcaccatgatccaaatacaagctaacattttgtactgctttcttccctttaaatgatttgcttaactgtatcgtttcaagcatagagaagcctcccttttttactttcttacatgtagcttaaaacaaaaaaaccgaagtccctactgactccggtcactcgttcaaatgactgttgttactttcgtcactttttctccgctcacacaagccgatggcgaatcgcataaatggccagttgggtccgatcccttaatgccaacttgtcaaaaatgtggctcgtttgattttttactgtgccaactgacaagcctaatcgctctgctatctctttgttgtttagcccttcccctatacatgttaaaatcgccctttcccttggggttaggctaggatcaatagacggctcctcttgattttgcagaagagtaggcactactttagcagctacttgatcctcaagggaaagacctccatttatagtacttttaatcgaacgaatcaatgattccgtgtcgccgtttttcagcatataaccattaacgcctaattttaaggactcgaccacgtactgatgatcatcaaacgtggtcagcatcaaaattttcattttcggataacgcaagcgcatcatcttggccgcttcaattccatccatttcaggcatacgaatatctaaaatcgccacatcgaacacatgcgtttcacataaacgcagcgcttttctcccatcatcagcctctccagttactttgatgtcttcatcggtttcgatcattgcttttaacccttgccgtaccatgacttggtcttctgcgagcagcaccttaatcattctatcctctccgatcagctaatcgtatactccccctgacaacaaattgtgagccatcatgaataacgtccatggaaccatccactttttctaatcggtctctcatcgcctttagcccatagccttcttgaaaatagggatttggagtcgcctcattcgccacttcaaagcgaaatatactgccaccaggtgattcaaacatcacttgcacttcccttgtagagctatgtttcataatattggtaagcgcttcttgtactgcacggtagaccgcaaaggattgttcccctgacaacgatgcagcaaacgcaccatgcttcacagagaaatgaattttcataaagctttccatttccagctgacgaatcaaacggatcacaccctgtaacccacctacatccttttgcttaaaggatttcactgcctttctcgtttcctctaagctttgttcagctagttttttaagctccgcaattttttgtttatccttttcagcagcagttagtcggaatgcttcaaattgcataagcagcgctgtcagtttatgcccgacagaatcatggatttcgtggccaatcaacatccgctccccctgcctcgcctgctcctcctctgtcacaagttgtcttttcattttcctgtattcttcaagtaaagcgccatgcttttgtattaatactgtttgccgaatatggatcgattgataatacaacaaagacaggagcagcagaagataaaataagcctatccaagccagttctgaaatcgaaagacgaacttcagctacgatcaatagcatgaagcttatttgaacaccaatgacaattaaactttttaaccgtggcaagtaaaaaacagcctctgcgaggactaacgcctgaacgaataataaaaagggataaaacccattttcgtccggataaaagataaccgtaatcgccagtagttggataaggaacaacgtcatttgcatcattgattttcctgcaaacagcgggagcaaaaacagcaagagaaaaaataaacaaagactcgcaagttgaatttcgtttaaatgcgtggtcatgcttgctatcgcaaccagccatacaagaaaatggatcccaatccaaataaaatacgttttattcatcctacaaactccttccaggcgtgcccgcaatccaattaggcaaccaacctgaagaatgtgcgaacttacttatatataaacgaaaccactttgccttagaatcacgcttatagctatcatcattcctctggcccatttcaaatcctctccacatttattaggtttttgccttgaaacacgagctcataaatatcaggcatcccaaggcttttccaaaaaagaaaatcatagttccggttaaagaagttcatcagtaaaaccatgatattgccgtgagttcctatgacaatgctcttcccttcatattcttccaacacgtttagcagtgcttgaacgccccgcttttgagcggctacgttcgattctcccccttcccaaaagaacgtagggtcttcccaaacttttgcaatcgctgcttgaaagtcctccatcggctttacagacaaacgccgttccttaaagccctcttttatgattacttctttcccgattccggcagccacacattctaccgtttgaatcgcacgcttatatggacttgagaggacagcgtcgatttttttgtttgcaaaaagccttcttacgttctcgctagcgacaatccctttttctgacagtggccttccaagctcatctgctgtgtacgttgaatgggcgtggcggactaaatacacattcgtttgcaaatgatcgcctccctttatgtagctcgcattcctttgacttgagacaaacggaatcaatcgtcagcaatcactctcctaaaatctcacgtaaaaacagctcacgattttctaaaaaatgccgtgaaagactcagccctaagaaaaaaaccatttgaaacttttggcaaccatgaaagacgaatataatcgccaagcaccgattctgacgcttctacttcataataattattccgtccgcccccggccgtattaaaatcacatttatcggcaattgcttctagcaatgttgattttcccgagccgttttcgccgacaaaaaaagtgacatggctcttcaagtcaagcctatgaaaatgtttcataacgggaatagaaaaagggtacgattgaaaagaagaaactttctcccgctgcaattcaatccgttttaagaacatgtatgcccacctaccattcaataatcgtactttccaccatggatcacccattttttagccagcgcttgttagaatgcagagcacccttgcttctttttacattgtacaaaaaaagcttgtcgcctgtcctaacaaaaccgaaatgcaaacggcaaagccgtgcctggacgtaaagttgtactcctttatgttaaaaggagcaattaaaaagaagtataaaaattataattatgttatcctattgtccaccaacctaaaaggagtttcggatgatgagcaaccttacagctaaaagctttattgatgagttgcaactccatcagaatgaagccgacaaagaaaaaatgaaaaaattctttaaagggtcagacaaaaacacggcgtgcttagggttaaacatgcgtactgtgttccaaattgccaagcaattcacggacatgcccctgacagaaatagaacagctcttagaaaacgattattatgaagtaagaatgggcgccgtcagcattatggatttccaggccaagaaaaagaagctcacagatgaacatagacaggccttgtacgacctttacattcaaaggcatgaccgtatcaacaattgggattttgtcgaccgtgccgctccttctgtagtcggaacatatctgctggataaaccaaaagataagctgtacgaaatggcgcattccttgaatatttgggagcggagaacggcgattgtaagtacgtttagctttattaaaaacggccatttggaagatacattttctattgccgaaatactcgtcaacgataaagaagagttaatcaacaaagcggtcggcagttttattcgtgaagccggaaagagagacgaggaaaagttaaagtcattcttgaataaacacgcccgcacgatgcctcggattacgcttagatatgcgattgagaagtttgataaaagcacacgggactactatttaagcttaaaaaacaattaacatgataaagcgaatcagccaagagtctgaactttcatcattatgcgcttgaatacaatcagtagtttgcgctatactataaaaaataacgacatcaggccaatgaagagaatccaactcggaggcgttttcgtcaaggggaagccttccccctaagttaaccggaaccgcccgttaccgcggaactaagtggattggacagttatgctgttcgatcaatttgggtggcaccgcgagaaaagcgctcctcgtcccaatcggacgagagcgcttttttgtattctcattaaaaaggagtgcgttgccatgttggacatcaagtggattaggcaaaaccaagcggaagtgcaaacaatcgcggaccaaaaggggatccccatctccatccatcaattagttgaatacgatgacagacggcgagccctgctccacgagttggaacagctgcggcaagatcggaatcggctcagccaagaaattagcgtgttcatgcggagccatgagcgtgagaaagttgaccaccacaaaaaacgtgtgaaagaaatcaatcaacgtttacacactattgaagaggagcataaagaagtcgaaggccattataaacagctcatgctttatgtacccaatgttgtgtcaccggatacgccggtgggcggatccgatcatgacaatgtggagataaaacgggtcggcgaaccgacaacgtttgcttttgaacctaaagatcatgtagcgcttggaaagctccatcagatgattgatctcccccgcggcgttaagactgccggcagccgcaattactacttgacggatatgggagcgctcttgcaccgggcagtgcagcagttggccattgacgtgttggtccaacgaggattcaagctgcttgaagtgccgcttatggtccggacagaggcattgctgaataccgcacacttcccgcttagccaagagcaaacattcaaaatggcagaggaggacaaatggctggtcggtacatctgaagtcccccttgtgtcgtattacgatcatgaaatgatagacgtcgcagagccgatcagacttgctgccgtctctacctgcttccgcaacgaagtgggatcggcaggaaaagacgtccatggcttgtaccggttgcatcaatttgcaaaagtcgagcaagtcattttgtgtgaagctaatttggatatatcggaacagctctttcaagagatcacggccaatgcagaggaaatcctgtcgctcctagagctcccttatcgcatcatggccgtatgcaccggcgacatgtcacaaaaaacctacaaacaatgggacatcgagacttggatgccgagccggcacgggtacggagagactcattcggcctccaatttgctggattttcaagcccgccgctcaaacattcgctaccgtgatgcagacggcaagacacaattttgctataccttaaacaacacggccatcgcttctccccgaatattgatcccactgctggaaaatcatcagcaggaagatggttccattcggattccactggctttgcaaagatacatgcaagggcgggaacgcctggagccctaattaaaggccgcctctataataggggcggctgccgtttaaaaggacaggctatacccaggaagacggtgcggagtgaacgaaaaacagccctttaatcttcatcttcatttaagttttacaatctcctcaaacaagtatccggaaaaagactagctatttgtacgtttaaaaagacagcctttggccattagaaaactcgatttaatttttttggttagcgactccccattcacataattcttccaaaacaggtaataatgtctctgctttttcagtgaggctgtactcgactttaggagggatttgcggatactctttccgtttcaccatgccatcagcttccaattctttcagttgtgagcttaatgttttataagtaatcgttcctatttgccttttcaactcattgaagcgtaccgtttcgttttcggccaaaaggtaaataataaccattttccatttgccgccaataacagacaaagtgtaaccaaaaggcgtatcttgaatatgtttcactttgcctttgtattcagccatactcatctttacactatcctttcgggtagtacctatcaaaatagtgcgtactactttttaatttgtgcccagtttatactaaccttactttgaagtaaaggagagaaaaacgatgacacaaaaaactgtacgcttattaatgccccaatggcaaggaggaaacaaccctaactactcttttggagccgaactgcttgcttggcttgctccagacaatgatcaacctcttattcacgtgcctgttcaagcttataatggtactccgcttgagaacgagaacggtatgaatgggagaacgcagttgcttgcacagttagaagctgcgcagcatatcatcaaggcccataaaccggatcgtattgtcatgtttggtggcgactgcttagtcgagcaggccccatttgcctatttaaacgaacgatacggcggagaattaggattgatttggattgatgctcacagtgatttagttagatatgtcgggtatgacaatgcacattcgttacctctcgggaatcttctgggagaaggagatgaggagttcgcaaaacatgtgaaaatccctttaaaaccagaaaatgtctttatcgcgggattagcggctcctacagagcaagaaatggaattgtttgcagaagcgtttcaaagactgggtatagctcctacagaaccagatacagaagtaattcaaagactcggtattagaacggctgggactgaggagttagcaaatagtactgcatccattaaaaagtggattaaagaaagcgacattaagcacctggccattcaccttgacttagatgtccttgacccaaaagcattccgttctttattattcgccaaccctgaagcaccttttaaccttacgccggagggaacgatgcaaatcccgcaactgattaatctgattaaagaactatctgaagaaacggatgtggttggattaggaataacggagcatatgccgtgggacgctattaatttgaagaacttacttcgggatattcccctattaaatgagtaagttttactatttcacgctttgacatgtctttataaaaagagtacttcacgaaaactgtgaacgctcatgtcactggtggtccctttctccacagatgacatgagcgtttatcttcaaagatagtcactgtacgtagtgatctagcctaaccgctgccgtcagctttgcgacgatgccttgagacgccatacttgtccttcaaccagccacattgctccactttcgggtcggctgatagcttgtcccaatagtaatcaattttatcctcgtttgcgcaccgaattaacaaagagatcgcttcattaaacgataaacatgggatactaactgcccatagcgataacgttcgatcttgccgagctgcgaattggcaaatacggagacatagaagtctctagcttcttccgccttctccacccacatctccgacaaacatcatcgctggaataataaaaggacgttcctcatacggggtgaacactgccttgccatttgtcccttcaaaagagcttccatcttgttctggtttctagttaattataagtaccgaatgagaatttcttttcggttgctatctttcctatgcttcatgcgattctataacatgcagggtgactgacttttagcaaaaatgggtcgataaagcaactgcaaactgcttatacttgttcagtaagtatccgttctaagcaactacatagccgatgcgttcatttctcactgtgcgaaaaactccgttatttgtaaccgcttcaatttcttatatacaaactatgctgttggtgataaaataatttctataggaaacaattttatttttactgaatacaaaaggaggacatgactcatggatcctattgaaacgactatcccatcttttgatggtacaaagctttactttgtaaaaaatctggtagacaatgcgagggctgccgtcgtcatcgttcatggcttatgtgagcacgccggacgctacgactatttgacggaaaacttaaatgcgcgcggcttcaatgtataccgttttgatcatcgcggccatgccagatcagaaggcccacgcacattttatagcaactttcaccaaattattgatgacgtgaatgtaatggttgatcaagcattacaggaaagcaccaatatacccgtgtttgtgattggacatagtatgggtggctttgcctcagcagcatttggcaccatgtaccctggcaaagtgaaaggaattgtattgtcaggagcacttacccgctataatacccaggttgcaggggaactcccgcttgctcttcccgcgggaacttatcttccgaatgaacttggcagcggagtgtgcagcgaccctgaagttgtagcggcctatgcgaatgacccgcttgtagaaaagcaaatttccgtcgatctgtttaattgtttaggtgaaggtgtagcgtggctaaagcagtctgctgaaaatttcgttgatccggtctttgtcatgcatggtgcgaatgacggccttgtcagcgagcaggattcccgtgatttttatggagatatcgcatccgctgataaatctttaaaaatttacgctcatttgatgcatgaaatcttcaacgagccaagccgcgacgaagtcatcgcagaagcgattgcgtggctagaaaaacgcatctaattgtaaaggtctgtgaaatacgtaattagaatatgttatgatcctttctaaaggcacacgatttaactatggaagggatttattaatgaaactagaatggatgggggaacatcgagcccttattgagaagatcattaagtatggcaacgcctattccaatacttataagcagcagcgaagctatggtacagatataacgttttccgcagcgcagatccaaacgttggagtatattctagaggctgaggaaaaggaggagaaaatgtccgaaatggctgcgcgcctcggagtcagccgcagcacgttctcaaagaatgttaaacacctaacagaaaaaggcttattagaaaagtatcacttaagcggaaatcgtaaagatatttatgttaagccttctgccaaaggacgcgaagtgtacgaacaatatacgcgatttgtttacaagctctgctttgaggaaatctttcaatacgcagacaaaatttcagaggaagacaaggacaacttcatccgtattttagatttattcgccgatgtattgctctggtacggtaaaaaagaacaagagccgcgaaagcttataaaaattgatgaacaaggtaaacccgattcacctatgtaagaaagtgaacagagtcccccaagcaagcttgtttaattgatcagacagcatcccgcaggaccaagctcggaacatttaatccttgcgggatgtacaactgctagtagaaaaataggaaagcgcttttgcccttagtatccattttactttcgtggaccgtttatcctcatttcctccgctttatttgagcaatcgccccctcttctattgttttggacagctgcttgtatacgtaatctcgcttaggttaagcagtaagtgccagtctttgatagtaagtgggttgcatccaagatcctcattcaaatgaatgccatcacaatagattttttcctagtgtctcgtccacactaagtgtgacctatccaaatgtacgttgcatatccctcgcccaatatattttaatccattctcacatacagagggagacaaaagagaacagcagttttataatgggtgcaagtgatttcaatccactccctcatacagtgggagacgtgccgaatgggaaatcccgctctaccggttcttgagctctatggtttaatttttcatcttttggaccacgcggcttcaagctacaattaattgaaaacggcactattggattaaataatggtagaaatagactcatgtagagcatgataaatttaaatgcttatccctaaaattagccaaagtgggtggtcatatgctgattcggacttacattccgcaaatgcctttatctatgtttgtcgattacttttggtatatggaagcttacaatccttctcatccgagggaactgactttgccagacggttctgtggaaatgattatcgatcttggggaggatgtgattcgactgtttgatcgccacaatcgcgagttggtttttggccatgccattgtctgcggcccgcattcggaatattttgtgatcaattcgacatgtgcgtcaagggtgatcggcattcatttcaaaccgggcggcatccacccgttcctgaaagaacgacttggtgagattcataatacacatcttccgttacatgcattatggggatccagaataagtggacttcgtgatgaactgctagattccttagtaccagaaaagatgttccagattcttgaacgaagattgctatcgcttacgataagggatttagaaaggcatccggcagtacaatatgtgctgaacaaccttcataggaatcgaataggcgaaatcattgaacaagtcggcatcagtcatcgaagattcaatcaactattcaaggaagaagtgggcatgacgccaaagcgattaaatcgcatttatcggtttcaggaagtactgcgcaatcttcatttcggggaaactcgttgatggactgacattgccttggaatgcggttattacgatcaggcacatttcattaaagatttccaatcattctccgggcttaatccaagcgaatataagcccatatcaggaaggcattataatcacgctgcgattttcacgtaaggtcaaaaatttacaataaagcctcatggttacaggctataataaatataacaaggtgtatacattcatggaatcaaggttgtccaggcttttgaagaaggttttttcgaaatgaaggagggctgcataagtggctaacaaaatcgcaccacagggttatctatagtaagagatgcaaatcagttgattgcgtttctgaaaaaggtgtttgaagcagaagagttaaaccggggaacaagtgaaggtggagccatcactcatgcagaaatacgaattggcgacacgatcgttgaattgtctgaagggaatgagaagttcccgccgagaacgaatgcgattcatgtgtttgttgaggatgcagatgcttgttattcacgagcaatagctgctggtgcgacatcactgtacaagcctgcggatatgccctatggagaacgcagtggaggagtggaagatcctttcggtaaccattggtatatagcgacctttactgggagagaaggccatggttactattgaccaggttcggcaattggcgctatctttaccggaaacggaagaagtagagcattggggaaagccttcctttcgtgtacgaaacaaaatttttgcagtgatccaattggacggtgtgtcactggtcatcaaaacgacaaaggacgacctactggcttacacgacaatggcgcccgagatttatcgcataccagacagttttagcaatctggctttcatgatcgttcgcatggatcgcgtagactctggagaattccgcgatttccttatgctagcatggagtctcgtgtctcctaaaaaagtagtgaaggcttactatgcagcaatacaaggaagaaaatgaacgataaaggagacacaataatggcaaaagtgataattcacgccacaacaacacttgatggatttatggctgacaaagacggtggtatcgattggatgtttgattttgaagctgtggaacaagattatgcagtagtcaataaagttatggaggaaataggtgccatagttggtggcgccaataaatcgaacacaattgaagaaggggagataccgtacggcggcatgttgaaagtcccaatatatctgatgacgcacgaagcccatgaaccagttgaaaaagatggtattacgtaccgtttcgtcgttaacgatattaagcaagctgttgaggctgcaaaagaaagcgctggcaataaaaatgtcgctcttttgggaggaagcatctccagacaatgtcttaaactcggtctagtggatgaaattgtactagatatagtgcctctgctattgggtgaaggcatttcattgtttggtgggctcggagagcgtattaagttggagcgaatagaaacatcggcctttgcgagtgaaactcacctgcgataccgggttgtgaggtaacgtatcctagcttttatgaaatgatgcgggttgacgacatttcaatccactccctcacgcagacggagacacccctgtccgcacaattagtaaatgtaatttaaaattcactccacgaacgtgaattagattcttgcagcatgtgctcgttcaattgccgttcgtaagattatctggaaataagataccattccttcttgcacagcgcgaaaacttattcacaagcgggaagaaaacagcttgtagcgactaatgcctgtcttcagattttatccatgagcaacgcgccttccttttttgttaggttttgaatcgttcctttcagataaaaagacatccagcacaaacactggatgtctctttcctttacaacggcaatggcgcgaccgctgagatgagttgtttttcaattaattcctgccagaacgcttctgggattttctctcgtaaggcttcgaggtcttccttaatgcgatcggatctcgttgatccaggaatgaccgcagctaccgctggatgcgctgttgaaaactgtagcgctgctgcttttaggctgacgccgtgagactctgctacttctgtgactttgttgattttcgtttgaacgtctcgtgggatctcaccgtagttatagtgatctcccccaagtagggcacctgagctatacggtgcacctacaacaatggctgaattcgattgctcgacttcaggcatcattctgcgcagtgtgtcttcatgatcaagaagggtgtattgggttgcttgtaaactaatagttggatgcacttcttcaagttgaagggcaagctcaattgggattgttgtgtttacaccgagaccccatccttttatgacaccttgtttctgtaagtcatcaagtacaaggaaagcacctgttcgcgcttcttcaaatttggcgatccattcgtccccatgaaaatcaggtgacagatcgtgtacaaacacaaagtccagacgattggtctgcagtctttccatgctttgatcaatggaggtgtgcgtagcctctgcagagtagtctgttgtcattttattggttcgaccattcgtaaagaggccttctttttcctccgtttcgtcttcaatgacacgaccgatctttgtacttaaaacatagtcatctcgattttgcttggagagaaacttccctaaacgaagctctgccagacctgccccataaaatggtgctgtgtcataataacgaatgcctgcattccaggctgcttcgatcgtcgcttgggcttcttcttctggcacttcacgaaacatattaccaagtggtgctgttccaagtcctattttttgggtcagtaattcttttatgtgcttcatgtgtcattctcctccgtttcattcatatgcatcttttaccgttcatcttaaggtttaaacctcccataagtaggatatttcttccttaacaagcataggaagggctaaccctttcaagatgatcaatcttgaaagacaaggaacttatgaaattggtttgaaccatgtcagccaaatcatgccacttagaccggtttcttattaatgacatgaaacggagtgtagatgaaaatttaacacgtataacgtccacatagattataaaattcgttctactctatatccctctttttctaataatgtagggatacttagttcaagaataacatgggatgtaccgacaaagacaaagaatgtccgatcttgattgaactgtatggtttgatcaagcttctttgacatttttagattacgttgatcatgtaactgcgataaacaggctcactgtcgacaatcacaccgtccatatcaaaaatgactgcatatgcgccgtcttttttcatccttttacttccatttcatactaattaactgcttgattttctccacttctgttttgccggtctcttggtcaatcagtgatgtatacaaatgaggaatcaccgtttttgccccgttgtcaagacagacttgaacgatgcgctcgacattgtccacatcaattccccctgttggctcaaagattgttaaaccggcattgacagccgccttgaccattgccgcgacttcgtcaagacgtttttcaccatcgatcggataaaacttgacagaatctacgccaatttcagcaagcatggccgcagccagttcacaggaaacgttttctttaaagttagaactgcttggaccagtagaaatatagacttcaccagctgtcccagatggttcgatgagtgcattgacgagtgtagtcgacgcctttagctcgctcatccgcccacgtgtatagccggctgctggaaagacttgattgatatggtttggcaccgtcttggcggaaacatcagcaaccattttccacattgcagggtcgccagctcctagtcctactgagacaggaatatcgttgtttttatacaatgccacctgttcaattgcttctttggctgatggaaaatgtttgaccattacgcctatgagcacacggtctcctgctacttgcactagctcttttgcgttttctacatctttggccaatacgttgaaaatgactttttcgttcatgaggactgcccctctttcagtatccgtttgatttcacttgcaatgatgtcttcttgtcctttcagtaaaggacggggatcaaccgataatattcccacatttacataatgatgccgtaaaaagatggctgggttgcctgattcaagccggtggagaagctctgcagctgtcatgcctgctttgttggcatcgacttgaatttgcgcacggtaaatggctcttcccgcctcgtcttgtttgatcgaacaatgcaatcctttcgcatctgccaaagcctcggtcagctttgtcatacgttcaatctgttcatcgccattgtcttccttagacggatattgttttaaagcagcaataagcccggcaaccccttctttcccaactttcattggccggccaactcctttatattgcatgcggcacgcttccatccatttctttttcccgcaaatcaaaccagacgtgggaccttccaatgcttttccaccgctgtaaataacgatatctgcgcccattcggatatatgcttgaaaatcttcttctgccgctgcatcaacaatgaatggtaactggtgttccttcgcaatcctcatcattgtttcaagcgactgcatgcctttttgaacagcatgatgggattttatataaagaagtgcggctgttttctctgtaatcgcctgttcgatatgatctggctcgaccttattcgcattgccaacctcgatcggtttcccgccaccgattcgaaccatttgcgcaatgctggccccaaaatgaacttgctggcctttttgaataattacttcatttctgagcccttcggagtccggcattctttcgattaatgaaagattttttccggttatcaccgaagctgtggcgatggcaattcctgcggctgccccgcatgtagggcagccgtcttccgcgcctgtgtattctgcgatcacactgccggcgaattccatcatttcatcgatatcgacataatcttgcgcggcacgctttagcgcatctgcaacttcatcactgactgcagacgcacctagagccgtcattttcccacttgcgttaatgactttacgaagacccaactgtgcaaaaaaactcatcgctcactcatcctattctaaagagattggaaatattgcgccaaaaatcatggcgcctaaaatcgctccgcctgctactggctttttccatatatagaaaatcgccgcaccaatggttgaaccaattccgattgggatcgaagcacttgctgcagaaaggacgattaacggtccgagaaagcggcccgatgtatttccggcgcccatcataatatcagcaccaaacgtggaattggattgcccgactgttaatttgcgaatcgctaaaatggcatagccaacgagtgcccctaacacagcgcctgttagcaaggaaaggataaaattttcaattggggctgtgatacccgacgctagcaggattgccggcacacctatgccaagaccggtttgcaaggatccgccaatgtctaatatccctacaagcgccccttccaacacgcgggcgaataaaaagctcgcgccaaaagcggcagctgccccatagcctgctccttgaatcccagcttccaacatagcgacaattgcgacatcattaaaagcgccaattttatacacatagtacatatgcgttccggcaaaaatgcctgacgaaagaagggcgacaaaaatgggaaaggaccagtccgcataccaaaatgttttatacatatctttttcagcgagagactttgattgcgttgtcaccttacttcacctctaatcctaacagtttatgaaagtctaaaagccattctggtggagccatgttcatgctctccaataactgaatatcgaagccacggaaaaatgcgcttaaaataaagagaacaataactgaaataagcaatgtcttcgttactttcgtccaaccgctatcatcgactcccttgccgattaatatgccaagcaccacacctggcacggcattccccataatcaaatgggcagcaccaccgaaaatcgtcccccagaaaccagagcgcttgccagcgtctaatgcggccaaccagaaaatgacgggcataatcggatcgattaacaaattggctgccggcacaaggacgtggacggcaatcgcttgcaatgattccggaatcgcagaagctgtcaagttcaaaaaggcaacgacgataatcccaataatgccgcctgaaatcgccatttttttcggattatgtagcgtatcttctgggcgcttgcctttgcgcattaataccgctgccgcccagttaggaataatacggtggtccacatcctgtgtgaaggcacctgccccgacagaggacgcccacgcattaaagaagaagcctaatccgaatgaaaagtgggacgccgcatctcccgcgcaagcatttagctccccaagtgtccggaatgcccccattccttgtgcttttggtgcatggaacatccgggcggccccagcaccgacaccaacaccgacaaaagcaccaataatgattgattttattgctacctctatcatctccatatgtttctcctccgctatttatccgctacttgtctattgcggaaaatatgatttacaatcccatcaggcgactcgatttttttaaaaggaatctcctctactttcagcagtgtaatctttacatccacttctaacttgaccgtatactcgcttctttttctcgggaagaaaaagagcaaaaagcgctccgtgtacgtatgctcaatcgcttcattgacatggatgcttacaggttcaatccggataatcatcgctttatactcatccattacttttctctggattttcccgagcgccgtgttaatggcaagctccttagactttcctttgccgcttactagaacggtgtgctggaccatcttctccatcatgttacccttgcactttctttaaataggcttccgtaattctcttgccaagctcttctgtatccataaaaccaaaaccgagtactttttttccttcattaatggctgtgatgccttcatcaacagaacgcatgccataatgtgctgggtagccgtattttgtttgtgcagtgatggcacctgctccaccgcttccacagaatgaaataccgatatcagcattctctgtatccataacatcaccaagacgcatgtccgcgccaacaccgggaatgacaatcgccttcccaccagcagcttcaacgccttttgctacatgatgtcctttacctaagcgatccccgataaccacaacaacttgactcattttacattccccctccaatgattaatccttcattttagctgtttcaaaatggatagaaagcaagtatttctcatcctcatgcaaatccgtcaatctgttgcacactttttctgccatttcgattgattgcttggatacttcctgaaatagatgtttatcgataggctcgatccgttccttatgcgtggaacggtagaccatcgctgaaagatgggacaataacgatagcttctgcgcgtctgtcgtctgaatatgctcttgccttaataggttttctgtaaattgcatcacttccacgcacagttcgtagttttcactcttgcggtataattcttgcactttcccttccattttccttcgtgtatgccacctttccagtcttaacggttatatacggggtaagcacttgatgatagctcagttgttcaccttctgaatcaataagtgtagacatcccttcttctttaaggccgaatatcgtcacatctgctatggtcccaaggcgaaatgttccttgctctgttaagtgaagcgtgtcggctgctctttttgttacagcggcaaccacatctgtcaatcggtaccctagtgcaagaagcttggtcatcgtcaccatcaggctgcctactggagttgcatagttgtttttataaatatctgtgcttatcgtaaatggaagatcatagttgtccttaaatcgtttcattgttttatagctaaagctcgaagtgccatgccccacatcgaagcggacgcctctttcaatcgcacttcttgcttccggaatcatgtctcctgactcagttaaaattccatgcttctttccatgaaaagcatgcgtgacaatatccccctgtttaagaaggggaaaaatctcctgtaaaggcggcggtggattcccgatatggaccataattggcttgccaagccggtctgccaactgtctggcatggactaatggcttgattccactgtttttcacaacggaaccgctcatacgcgcttttatgcctacaaggctctgctcttgttggaaaatttcgtttgcttcttttagcgtcattaactcgtctaatttggcaagctcagataggccattacataagccctttcgtgacaggtttaaaaaggccaatatttctgtcttgcttttctcgatcacggtttccttaaaaagtggatagttctcgtaccccgcactgccagcatccacgattgttgtgactccctgatcgatccctactaaatcgggctcaatgcccagctcggtataatcttcaaacacatgggcatgcaagtcgataaaacctggtgcaacataatgattggttgcatcgatatactgaacctctccacctgcctgtatcacatcttctactgccgtaaaaacaccattgacgatgccaatctcttttttgctaatcgttaaagtttccgggtcaatcacgaagccgttctggataataatgccttgaatcatataatcacttccattttttcaagtactgtaaaagagtaataacctcagcttcatgaacatgtaaatctttatcctgtaaaatttgctgcacgctatggaacatttcctcgtcgctgtctagcatttgattatttgcatagaggtactggtcatattgcttatcaaagtaatagcggtgaaccattaaaaaaacgtgcatcataaacgcatttttccatctttcttctgatttaattggaaaggcttccaacaatgcgtgagcagcttcaaagccttttaaaataatttcctggctgaggttctcactatcttcactgatcgtaaactcattgttctccaacagctcgttcgtctgctcgtcgtctgaaccgatcatcgctcgtacttgtttgcgaatttcttcgatatctctttttgcaggcagcggctcgacaacgacaacaggaacggcggcttcaacaggaaaaacgctgataatcaaatccacctcttcagcctgacaaatctcttccacttcaagcaaggaacaataacagacaatatcgacggcaggaatttctttttctacccgatttttgattaaccgggcaacccctcttcctgttgaacatacatataaaacttttactttcttttttcgtttaaatgtattttcataggaaacgaggaagtgcagaacaataaaagagataaaagaatcttgggctatcaatgtgtgttgtttcacatactttcgacaagattccttgacgctttgaaaaagagacgcatggtttcttttcacttcgtcctccattgggttcatttcatttaaataaaatgagccattttgaagcctcagtgacaaatgagagagcagattgctataaagtttagggtcttttttatagtcaattctttcttgttcgcttacatactggatcatcttctctgtgatatcgactacatcgatttgttcagattctttttccatgattccggctacatacgcgtattcttcctcgagcaacggcaactgcatatctgtgtagactttctccataacgttcaccagaaacaaggagagttcatcttgatcatgagaaggctgcaacatccgatagctatgaatggcacgccccatcgttaatcttttcaccgaaaacgtgagccgcagtaggaatttcaacaaatcagagagccgcaacaaagatgccaaggatggcgaatagaacgcgctcatatgattttcagccatttcataaataggttttaatggctcttccaatatcgtgccaatctcgatttgccgctcttttttcgtaattcgagtcgttagcttatagatttgataatcatctaagctgttgtaaataatatgctcaagcatcagccgcagctgaagttcattgccatgaaggcgataccctgttctttgcttccgctccaactcaatattccatgacgttaaaaactcgtctacatgattcaaatcgcttaaaatcgtgtttctgctgaccgctagcatctccgataattgagcagcggttttataatcattcgtccataatagggacagaataatccttctgacacgcatcgtttgatcggggtaaatttgcgatcgcttaaattgtgtcaaaatcccccttaattcagtccgctcccgatcactgcattgaagccaaatccccttgcttgtctgggaattcaccgtcttcccctgcaacttaaaccatttgcgaacattttcaaggtcatacttaatcgctcttgtgctcaccccaaactcgattgacaaatctttgattctaatcggagctttcgtattcaacagcttatttgttaaatgaaattcccttgcgcttagcatgatttcaccactctactagtagtcgtgattcataatcgattatagatcaattataagtacatttacctagatcggacagacaaaattacttccccatccttagtgaaatcccttgaatattggagcaattgcagaaaaaatggccaaaaaatgggagcagcgatcagacttgatctctactcccattctttcttttaatgcttgttccttgtcctgcaatgctagagcacaagaggtttacacactagaaattatggtttctgtttaataatccatacatcacggccagcaagctcctcttgttcaccatctagcgtgcggccgctcagcaactcaacgccagcacgttcgccaagcttgatgttgacagggttctcgttatgattaagtacgaagagatacgattgaccttcctttgaacgaagcgtcgtttccactcctaccggcatctcgttaatgagagggtgaatgccaatggaagagcatagctgagacaaccaatcttgcaggaacgacgcttctgggctagtcgccacataccaggcttggcctgccccaaatttgttcacggtcagaaccggcatgcctcggtaaaaatcgtcgccgtacaccgctttgacctctgctccttctgaatggatcaagtcgcaaagaatgccgcactcgtattccgattttaatccgggagcttgatctgagaggacaattcggttacgttgactcggaagcaaggcgtcaatttcctccgcccatatgccaagcagtttccgcagttcgccaggatatccgcctgttttgacaagatcattttcatcgacgatgccactgaagaaggttgtgatgagggagccgccgccatgtacatatttttctagcttgtcagctatacctgctttcaccatatacatcactggggcaatgacaagatcatacctactgaaatcggcatcgacgccgacgacgtccaccgagatgcctaaacggtaaagggcatcataatatttatggacttcgtccacatagcgaagatcgatcgacgggccgctggacatttcgaccgcccaccagttttcccaatcaaacagcaatgcgactttcgcctgaacgttagcatccaaaagcgtatttccaagcttgccgagctcctgcccgagtgtggcacattctcgaaagacgcgcgtatgctcatggccgacatgctcgatcacggcaccatgatatttctcgcaggcgccgactgagcggcgaagctggaaaaacagaatcgtatcggcgcccctcgccgctgcttggtaactccatagcctcatgacaccaggacgttttagcgagttgtacggctgccaattttgctggcttggcgtctgttccatcagcatgaacggctgtccgtgcttcaaaccgcgcatcaagtcgtgcatcatccccgtgtaactgtgaggcgtatcgaaccgtggataattgtcccatgatacgacatccatatgctttgcccatttatggtagtctagttttttaaaggcgcccatcagattcgtcgtgacaggaatggacggcgtatgctttttgactgcttcgtattccagcttgtaacattcgagcaaactgtcggaatggaagcgcatatagtcgagggagattccttggaaattcgtctccgtccgcccgttcgcacctggccactcctcgctcagtccgctcggcaaaacgatgtcttcccaactatggaacgtgtgcccccaaaatccggtattccatgctcgattcacttcatcaagggaaccgtaacgcgccttcgcccattcccggaaagcggtttcacaattgtcgcagtaacaattgcctcccccgccatactcgttgttaatatgccaaataagcaaagccggatgatctttataacgctcggcaagcttttctgccatgcgaactgcatacttgcggtaagtcgggctgttcggacaagaattatgacgtccgccaaactttcgtttgcgcccgtaaaagtcgacttggagcacatcagggtacttgcgcgccatccaagccggatgggcggccgtgctcgtcgcaaggcagacgccaatcccgtcttcatgcagcttatccatcatcgtatcaagccagccgaagtcatatgtattctcatccggttggttttttgcccaagcgaacacattgagcgtcaccacgtcgattcccgccagtttaaacatgcgtaaatcttcatcccaaatcgatgaatcccattggtcaggattgtaatcaccgccgaaccaaatcttcggttttttcgcattaatcatcttgccacacctcaccatatatgataaaactgcatttaatagtttaatcatatgtgttgtaatcactagatccaatataaaattgatgtacatggatataagaatatggaggtatgtaagatgcgtcgagccgtccctgccaccccatcggagctgttgcccttgcagctagagacaatcggcattcaatatgaccaagaaccggtaacaaggccacacgggtacccatgttaccattggcttcaaacgctggcaggagaaggcgaactgtcaatgaacgggcgcacctggaacatgccagaacgatcaggcattctcctcgcgccaggcacaccccaccactacaagccaagaagcgacagctggcaaaccggttacattacgtttcacgggagcacggctgggaacatcgtccaatcactcggttggagcatcattgaacactttcagtggggagcgggccacgatccaatcaccggccaaatgaagagcttgcttgcctttgccgaatctggcggcgatccgtcgggatggcgctactccgccgacttataccgctttctgacgttgcttcgaacagaagcccgcaccgataaacggccgcctatctccaaacgactagaccgagtccaagacttgcttcactggctcgaacaagaatacgccaacccagaaatcggattggcggagatggcggcacagctcggcatcgggaaacggcaactgaacgaacgctttcgcgatctattcggccagaccgcatacgcttacttgatccaattaaggctccgcaaagcaaaagaatggcttccttcccgtcccgactggaccgttcgccgcatcggagaagcggtcggctttcgcgatgcgagccacttcgtcgccacgttccggcagaaagaagggatgacgccagagacgtaccggaaattgtatgccgcaaagccggggaaaaatagggagttggattagtgggggggctgccagcactcttcttacgactcctattcccttgcaactcaaaatcgagattgtgactaccttccttttaaggtgacaagaatggttgtagaagtaacgaaatctttttacctttatagatctggtgaagatcataatgttgcttttttgcccaaaactaactttttttccgcaacaatgaacagagattggagagtaaaaaattcactcataaagtatctgctgtattttgttctgcgtaagaaacgggcttgtaaaactaaaaacttgcatatcatcttttttatattcattctttttcagaaatagttttacaaagtctaggtcatgagtagagaaaataatttgcttatcaatctgacccaacacatcgcaaattgagtattgatttacatcatccatattttgaatgggatcatcaattgcaatgaaatcgagagcattgatattttgagcttcattaattgctaagaaaatagaaatcgctagtacgtttagttgcccggaactcagaatattttgagcattactttcttcgaatctatcctcaaaaacaactttaatagacagtttttcatctgccccgtcgaattgaattagattattagatggaagcggatttaaatacctgtaatacttctgtataggagaattactatcatttaaataatcttttgtatcagaatcgaagaaatcaaataacttcattttgtaatttttcagggaatcagcaatcttatcaatttcaatttttttgttattaagatcctcaactgtatttttgacttcttgaatttgagtttgaatttcctgattgtgcctaattacatactgcacttggtttatatccgatagtctgcttatcttcctttcattactggatatcatatttttattttttgaaattaacgattgaagtggaatatcatattgttcaggctttaaaaatgattgcagacgctttaaaataatgtggtcatcctgaatttcagaatacagtttttgaatattactttctatttggttccgatgttttactactctatcgctcgctcttgtcattcgttcaatcgactgttctacctcgttttctgtttttattttctttgaagaagactcgctatctaaatccttcaattcttctttaagtttttcaagagagattattaattcaatgattttttgctgtaaaataatttcctctcttactttacttaactcgtcttttaaatcggcagtatcagcttgactcagttcttcagaaaacaaatcgttgtttctgtagttgttgtactcctcttttaaacgatctagctctaaattcattttagtaatgctattgttcgtttcgttgattcgctcggctattttagctaacttattcgaaatcttggtatttaatgagatggctttacttacgtaagaagtatcctcttctaactttgttgtatataaaagaatattatgatcaatgcaagactccaggttttcttcaggggtagaagagcacaccgggcatttctccaagctatttgcaacaacgtaaccctttatatcttttatgtttgcaataagttgaagtagtaaattatccttattttcttgtattacaaaagatagtttttctttcaaaaccaacaacttttcttttctctttctcagagttgcctctttttttatggaaagttcccggttagcgggcaattttttttgttgttctagattttgttctattgtagtctgaaaagacaacgcaaattctaaggaagaagcctgctttcgtaaaacgctaaggttctctctgactttatttaagtctatggaattcatgtcataagcagctaactcttgctccttttcttgaataattgttcgcgtttgattgtacttctgaatgttctccctttcttttataagggaacttgttctctgatttattttcttcaagaattcttttatttcttctcttcgggtctccaaattttcatgaattgattctttcttagaaatttgatttacaattatgctgacagtatagaaacgctctagattcatcacctcgtaaagttctaaaaattcctcagcgttaatcttatcagccagtgcctgcctgtttgattgagcaatttgagtatccagatcgctatctagttcagtaataccaatgtcgtatagtttcttattaaactcaaaaatatcgacttccttttttacctcttcctttccctttatcgaattctcaagtgagataatttgattacgtataacctcagattgcttgattaaagaagtatgtattttcttcatgttatcagactcatttagtaaagccctaaaccccataatgtccgctaacgctctgaatcgttcagaaggttcttctgatgtaacaaaatctgcgacttggctttgagataatataaatgtctgtttaattagttgtccataattaccgcgtccaaaacttgtctgatctaaagtcccttgttttaagaatgtttcaacatctacttgccctcgatatagctttccatccctactactcaaggaaacctgcgtattcccatagtcgtttccatgatcaatatttccagtgacattgaaccatcgggttaatgtgtttccttcgaattcaatagaaactgataaaatctcattctcttgaaatttacaccgtttgttaaatatatccctctttacttctgcatcggtgccattcattcgcgaaattttacttgtaaagcaccactcgatggcgtcaaaaaatgaactttttccaaatccgttatctccgtgcagaatggttatttttctcgttagatcaaatgaaacttccccataataattcctgaaatttttaagagttattttatctattttcatagcgctgctccaccatctttaataatttattcatcaacacatccaactgatctaggctcaatttattatgcttcccatcactttcttgaagaaaatgaatgatttcttgtagatatatactttcatcttctaacgttacttcattcttaatcggctttttgatcaccctaaattcgtctaaaaagggaactcggttcaagtctaattcactacttattgcatatttacgcagcgccttagtgtctcgttcaattttatagtttgtttcaaaatcaatttcactgccaaagcagaatagcaaatatgtattccagatattttccttaccctctagtaaaatcgatcttatttccattgagaatgattttatcaaatttatttcctcgctataatgcagtttttttaacaccacattatttatagaagatttataaaatgaggctcctaatttttcgatttctttgatgtcgaatacctcaaaaccattttcaagtaacctgttatgagttgcgttaaaaatatccatcatctcacctcattgcaatacttattccatatttcttgcatcttatcttggaaacaatcttgttcattcaaggcttccgagaagtctaatttcatttccgttcctgggatgatgtcaacataatatgttactttattaagaggttgctcattttcaaatccttctatttgaatctcggagaagcttttaatttcacgacgaactgtttctgtaaatctcctgtccccgtaattttgaaatacgattctaagcgatttatccaacaagtaaagatgatcatttgtatcagattgttgtatgatagattcaagcttctgtaaacctgcttctaaattatttcttgattccaagcttaagaatgaaaataaaagatttgaaaccgtgcatttcttagttaataggttatttgaatcagtgaattctagaaaggaatccttgacgatcatcatgatgaacacaatattgaaaaaatcgagtaatttttgctgcctgtttatctcattcaagttgacataagctgagcttttaatagtaccatccacatagcgctcaatcagagatctaatattgcctccattatcaacccattgtttaagatactcacgataggtatataatttatctttgaatgcatctgcatgagcacaggtttcattattactaactatagaatcaataactctagaaatagttgatttgttaccatgcttttcagtagtttgctccactgcgtctagacatcttgttctgatttcactcaaaatttcttctaatttatccctggtgataagtaacctttccgcactatctctgtatgtacatcttgtgcataagtgaccaattaaagtgttcagatcctttggatgaaccctgaccctgtccccaacatcgtggaatagccactcgctgagtctcatacacaaatgatcctcaaacacctctaatttctgaagtcccgttccggtatgcaaataaaatcttcttagtagttccttggttttttctccacattttgtttcataatcataaacctctccattcttatcacatacaggagcactgacttttaaaaacaaatgatcggtatccgctatgtccaaatcgtaatttgagttgcctgtatacacatcgaaatcgaaatctctggtttttataatatggtaactcgaatatagctgaaactgagttaaatacccatctttttgctggagcagttcagccttggataacaatttgtcaatccaactatcgtttcttttttccgtccttcctgctattggtgaacgatagtataagcccgatgcgggactggaagtagcgttcatttttactttttcgctagtcttcacttggacgaaccttaccgtattatcttttccaactacaatatcatccagatgctctataaaaatgtaatcccacttgtccttaagcatgtcaattatgtactcaatcgcaaccagaaattgataataaaatcccgaaattgccactattcctcccgtctcttccggtacaacatttgctaataattcagcgatctcattgctagatttaccaattacattatttcgcaaaaatgttacgttctcagcgactttgtcttcttggttttcaatatagtgcttaataattttatctattttttccattgtgaattaaactccttagaatcattgtatcctctgtcaaaaatattcgacatcgaaagtcataaaccctccaaaagtaaccattttttcagtctcatatactcttgcttttcttattggtttaactaacaagcatggaggaaaccaatatgtacgcctatcttttttctcattgattattcttttcagattttccactctccaagaggccctccaattgggactcttgggagtagtgtacaggcaggaatagcaaaatgtcattttgcgagaaaacagcatgaaagcagaacttccactggcattttttagtagttccttccgacaatcgaatggcgctatacaacagtcttagagaaaggagatactattggccagaagagaaaaaacgaacaagatcaccgtcaagttgcccaaatcacagtacgattcactcaagaaatacgcggcttccaagcatttcagcatggcagactcagacgggccttcattcaaaaagggatgtccatcgaagtctacacccaggaaattgatttcattactactatcatccgtcaagagattggcgttgcgataaacggcctcggcaatcgattagccggactggccagcaaagacctgatcatgtccgccgcggcatactattccacggttgcgattattgccgacctcatcgatacgcaccgttacatcacctttctagaaattgaacggacatcgttaattggctgtcgagtacaccaagatgaaactgaacgatgccgaaaagctgtgtcctttccggcgatgccttcgatcaaaatctggaacgactgccgggaggagatacaccgatgtcagcgctgatttataaacagcactctttcatcccaatcagccgaaaacggctgtcagcaattatgtgcatattgattatatcgtcacccgtcccggtgcagttaaacatccaagaaagagccacgggttgtttggaaaatgaagcctggaacgctcaaagcctttgattcttggcaagaagtcgcccggatcgcccttcaatggggtaaacgccataatgacggatgaaccacttcattgcccgaagaatgccattcattctcggttagctagctaccttgttggcccccatcagcgaagtaaggacagacagagccgccgccttaaatcttacgttcttcatattcaaaaggcgcttcgcatgagtaaatcttatggaaaaatcctttatatggaatatcttcttccaagcattttattaggtacgacagttcttcgtcgcattttgcctcttctccattgtttcgcatcacctcaaatgcgtctatcatattttccataagtatcgcttgaataaataaaggaagttgctccagcataaaatcatcgatttccgtttcagatcggtaaccgtcgagaacgttttcaaaataatcgtccataaattccctgcgtttgctgttgtctttttcaaatcgaatccagccagcgccaatcgtccaaagattcgccaaatcgtacatataccaacagaagcaagagttatcaaagtcaaaaacagtaatatcgccattttcaaaatctacgtgataattaccgtcactataatcaaaatgaaccatgccataatggtcggaactcctgttcaacccctccaatgttttcagaagctgaaacagtttttccttaaccagagataatgaatccgggagcaattgatcaatatatgctctattatatttatcaaaaaaatcgtacctccgatggaccggtttatattcttttgataagtggtgcagcttaccaagcgttttaccgcaattataaaagtattcagcgataggcgctccatcccgataacgataatggttttctgcgagcttcttccctctggctcgttcaaacagactgacaaagaacgtctggttctcatatgcgatctcttccactagattccctttttgggagtcgacgacatttgaaacgctgccgccgtgatcgtataaatagcgaacatattccagctcgcttaaaaaatcctccttctttctgtcgcttaaaaatgcgatcctaagcattttttccttttcacctgcctttttgcatgtgtatactaaattcctacctccatcatggggcggaatttgagaaaaggaataaccttccaaaccaaataattccggaattttagaaatcaataatttttcggctgtattaatcgccgcatgaaatgctgtgctcatcggcttttcctccttttttctttcccatactttcaagcaacatgctgagcatcttgttacgtaaatattccgctctattttctacaaatgccgcctccttttaaagtaaggtagctgtcccagcactcgatgagtcattctccactttcaaaggctactttgatggcataaaccggatcgctttgatgcttgattcagagaccggattttgccgaaaaaagcccttaaaaacatctatctcgcataaatcaaaaaatttcttgacgcaaaaataccgcagcaaacaaccgttcatcgctgtctgctgcgggccattcaagaattttgcataaaaataacacaccctagagtgtgctaccgttgcttttgaccaacgcttcagtattcacgaaaggttactttttggcatactgaagaaaagggcactatccccattaaatcagtattacgcccatattcagttttaagtaatggacacctcaaaagttgcagtcatttaaatacagctcctttcgctatgcaaagaataaaatcttagtataaagtgtaccatgtttcggcgccagcagtccatatttcaagaatgttctatttatatgccaaaggcttggtttaatgataaggatcagttgcaattctttttatgtgatataatggtcaaattttagcttttttggaatgagcgaggtgtaaaatcattacaatctgttctgtattattcatttaataagcttctttagtttaattttttacaattcaataattaaacaaataaagaactgtcgaggccccattcctctctgctgttttgcaccgaactaaaaataagtttagctttgtgccattcccccatctactgtttagatactgcttttctccgaggcaaggacgatcatgcctctcttgcccaacacagctcagtggaacgttatctttagcggattcaaggacttaatccaaacgactctccaaacagattgtcgtaaaacagcggcaagaaaaccgctgtttcaaccaaaaaataaaaatggtagtgggagcttatcaagcctccactaggattatcacgtcttacttaacgagtaacatttgtcaattggcttccccattcaccgataggctcaagccagctaacaattctgtcatcaattaaactagtaagagcttcttcgtattctttgcgataaggctttggaaattcttcctgtatccaacgatctcttgtaccttgccagatttcataaataacaagatcattcgaattatcgatatcatcggagacgatggccgttacgaaggtaggttcgtttctgaaattgttaatcatggcaaagagactgtcgcgaaaaatttctttcttacctggttttattttgaaacggatatttagaataacttgatttgtggacataggcacacccctttaacatgtttttgaaacctcattccttccctatatcgcacaagagtcattatgaatcaaacgtgtcaaattgaaaagtacacactttttagttatatagtaaccaaaaagtaataattgtgtttttcattgtagtcatacacgcgcattccttgattaaaaatgaaaactaaatttttgggactatggtgagccacttcgctcaatacctttatccactccagaaatcctacaatgttattattggttattgtaaattagcctaggcttgggtttatgaatgttaattcagataaagactagaatgtccccacgcctttcgtggggacattcgtacagcgttatacgtttaatccatatgcaaaatttcgaattcatcttgggcgaatgagctctctgcataaatcccaccccaattgcaaagtgcttccaaaatagattcaagagattgaccaagttcagtagttgaatactcgactttcggaggtacttgattatacatttttctgagtatgagcccactcatttctaattctctaagcgtttgaattagcattttttgagtaatagttggtatcagtctctttaactcactcgtccgctttgggccttttatcaaataatataaaacgagagccttccactttcctccaattacatctaaagaaacctctaagccacagtaataagttttcattttgaaataacacctcctgttgtcaatatccatttttcccctcatattttcgataatttattaacgattagaagtaattttatctctctgtgcctcatcctgtgaagaagtttgctgactctctttccaatcaaggttattaagacttgaaaatttagtccatacactcctttctattgataaattaacatggagcacttgcttcaggaatggtaattaaaatcaccaaaacggaccatcattgctcggaatcggcagcattgatggtcatttctttcacaaagcgtagtgtgtcaacagccgacccgttcagccacttctggctcatcctctgtataccagatcagacgcatgcccttgccatcttcactgtcaagaaactcaagctccgtcgccgtctgttcttcataataacgggtcgatgtcagtggcagcaatgacaaccgcattccattgtccaacttcatatagagcttatcctgttccatatatacgtctacatcaagggaaccttccgtctcgctggcaaatctgtacttaccaagcagcgtttccacattctttgggtcaagcggaatcactttctttgtctccaaaggcctcggtacatcgtattcttctccagccataatctgttcgatgctcttcactagttgctgcgtataagcatggtcgcgctctccgttttgcagcataatcaatgtcatatctcgatcgatataacgtttaaaccatgtagagtagcccggccatcccccggtatggtggacgaaacgccccagctgctcgtcacgctcgatcagccaacccatcccataattgaatgtctcgccattattcatcttcaccggcgaaaacatgagttgacgcagcattggacgaacaaactcatcattatacaaggctcgatccagtcgcaacaaatcgcccactgtactgttgaccattccatctccttgcaagccgtctaaatagtgtacgtaatgtagttcaggcacttcatcaggcagcacatatccgccatgtccaatccgatagacgtatccccaagcataatcatcaggcacaggacccggatccacccggcgattatacactttcgttcgcgtcattccaagcggttgaaagatctgctcgtccaaaaagtcgccataacgcttgccactaatcttctcaatcaggatagctagcataatatagcccgtgttgctgtacatccaactgtcattaggagcgaacaacggatcaggctgatgcttaatcagcatttgcaacacatcctcattgcgagcataacgcgtaggatcccacacgtttgcaaataactccatgtaatcaggcaagcctgatgtatggtttaacagatgccgtatcgtaatccctggatacggcagttcgggaatccaattagcgatcagatcatcccagtgcaattgccccagttgctgcaaacggataatacctaaagcggtaatcggtttggatacagaagcgagttcaaacatggagtccgttgttaaatcgcgtgcgctaccgtcgtagtattctgctacccccatcgcttcacaaaaaattgcttccccaccaacagctacaagaacaacaccattgaaacttccttgctgtttgacgtcttcgaataatgccttgaattgttgttccaccttttcttttttcactattttgcacctccgtttaattgtgagtgaagatcccattctacgaaactttcatgattctcgggtaataataggagcactcgctgttagctcgccttgctcagtcaacatatatttagaaaaataatgttccagtgccttatccaaccatgctgtctccttttcatttaatggcatctccactaattggtcaagttgggtaaggtgttcctcatccaagtttctaaaattgtcgattgccttctgatcaatgtaagtcattgcccagttcacgtatgcactgatcacggtctcagcttcctgtgaatcgttcggaccatgtgataatcgtttcacatctcgggagaagcgcaccgtttccgcatccattttctttaacgcttccgctgaccgatcaaatagcgtttgtgctgtatactcggatagatggttcgccacccactctcgctgcatatcttcttggttcatattgcgaattagactgaacaatagcggatgctccaattgatcctcagactgaacgattgccatcatacggcttatcagttcaagagattgttttatctttacaagctttacttccaacgcttgctgttgcaacctcaacgtctcaaccagagattgatcaaattttggaagtttcaacagttcacctatttgggttagactaaagccaagcgccttcaaactcaatattttctgtaattctaccatgtcctcgatctgatatactcgatgcccgtttgcctgtctaagtgggtttaaaagacctaactcttcataatagtggagcgttctcactgggacgcccgtcagtttcgaacattgaccaattgaataggtttcatccatttgactgcctccttttatcctgattgtaatacctacagtaactgtaggcgcaagctttatttagtatggtttggtagatagagataggaagtctagaaagtgacattgagtgcaatatagcttaccattttggatggagaggtgaatgatgaacagaaaacgagccttaggtatatgctggtacctaattagatttagctcatattgccttaaaacattgaaataatcccgaatggagttgagtaaatgagtgctgaagttattgctattagtggagtaactgctggaggaaagacgactttagttaatcagttagtaaaggaatttccgagcgcatgtgctttttactttgatcattatgaattcgaaaatgcccccgatatgaaagacattctaaacaaaccagctgattattttaatgcttatagattagataggatgataaacaacttgaaggaagcacaagataaatatgattatatttttctcgattatccaatcggttatgaaaacaaacaaatgggtatgtacatagataaagtcatttatataaaaacccccttggatatcacctttgcaagatatctactgagagattttgcgaattcctctgggaatgacattttaaaatgggcaaaatgttatttagaagaagcaagaccgctatttattacgcatgaagagatcgttagcaaacatgcggattatataatggatggcactcttgaagcagaagaaaaaatagcaaaaatcaaacagttattaacctagagatgatctgacaaacatcgtagtggagacaaaaaacccattacataaaaaaagctccctacaaagtagaaagcatctatgaccttgcgaattgttctgaatgaggttttttttcggtcgtcacacggcccggctgctaaccttttggcggcactgccgcggcagtgcgctgcatgaattttgggattaacaccaacgataataacgcgactgcaaaatgcaagggattggccacggttccaatatgaggctccatcggatttgaggccgtgttgatggtcatcagtacagccattgccaaactcaagattgcatagtatattactgccctggacgatctcttttgccaaaaacggtaaatgaatgcccctattacattagcgaaaaatgcggataatgtaatcgaaaacccattcaacatttcgaattgaaaatcattggccgcgataattccccaggccagcagattagatacaatggctgaaatcactcctgccgaagaacccgcaattaatgttctacctatcttagcggaactggctatctgttgttgtgtcgttgtctgcatgacaagcaactcctctcttttattcacttattggtatcatgtccttgtgtcggaacggctgaatcaagaagctgtggcttccgcagtgtaagactgagaacgatacctatggctgccaatattgcagtcaatagaaacgtatcactgtaagctgcggcaatactttgtaactccacattcatagtcatctcattcattcgataggctagaaatcccgtaagccccgctaccgcgaaagatgttattacatgctgcgctgctgtagtgagtgaagtaactcttccgacgagatcacgcggagcggaattgaggacgtgagtatttagcgccatcataattagccccatgccggaaccaatcataaacaagggtagcaagagcattgtcagcccagcctccggtgaaacgtgcgatagccagaaaagcgcagccgatacggcggttaaaccgatcagcgccagcggacgggcacccaccttgtcatacatacgccccccaacaggcgtgaaaaggatcgaaccgaccgcttgagcaagcatgatcaatcccgtatcaagcggcgaatatccccgaacagtctggagatataccggaaacaggaccatcacgccaaacaatgcaatttgcacaagccataaaagcagaatacttcgtgtgaaatcagaagatttgaacacacgcaattcaagcaaaggctgcctgtgccgcagctctgttacaatcaatccgaccaatgccgcggctccgaaagtaagggcaaccacagtgcgggtggacgtccagtctacggccccttcgcctactccaaaagccagcatggagaaagccaacggagccagtatcatgccaagtgtatcgagctttggcacttcaccctgcggaaaggctggcaaccatttcatccctaacgcaatggctataatgccaatcggcagattaatgagaaaaatccattgccaagatacataatcgagaagccaacccgataatacaggaccgagcgcaggagcaatcaggatagggatacctagcacacccattacttcccctatcttatgggacggcgtcagcctgtatatcaccgccatgccaatcggagttaccatgcctccgccaataccttgcacaatccggaaaataatcaattgctcaatggtttgcgccattccacatagtacggatcccaaggtaaagagcgcaacggttgttaaaaaaatacgcttagctccgaatttgtccgtcatccagcctgcaagtggaatgacagcagacaacgccagggtatagccggtgaacgtccactgcacgacagccaacgtactcccaaactcctgttgaaactttggaaaagccacattgacaatggtgctgtccagtatgaccatcaccatgccaacgacaacggcaattaaaggaccgataatcgttcgtatggaaaaagcctgcatgtcagtcaaatgaatcctcccttccatactatgatttttaaaatcacagtttaaagtaaaaaaacttgagatatctcaagttacattatattcacaaactgtgtgtttgtcaatcacagttttgggtttaaagttattttaatttccctcgttgattttcttgatcaaatccgctattgtatgccgctctaaaacctgaattaactgtttttccgactcattaatcacggtagtgaacatttcccgggtttcttgggcaaaaggcccgctggtggttgtatcaagcaaacccgtataaagcggatcgaccacctgaatcgcccggtatacatcagcaaaagagatatcctccggttttctgcgaagggcatagccaccctctcgcccttctcttgcctcaacgattcccgccttgaccagtcgggacaggacgcggcgcgttaacgtggcttcactgcaaacatgttcagcaatttcattgctggcacaatgcgatttttgctggccggacatgaacacgagtgactgaagggcatagcccaaccattttggcgttgctgttggcgtgtatttttcagttggcattaaattaacgtcacctcattacattgaaaatcagtaattctattgtaacagcagacatcgaccgacgccagttgttggctcttgttttatcccacttgtcacctgacccgagtggcaaaattgcggttacgataatctgaacgatcatcatgagtcgacaatcgtaatcattcccaacaccatagacctaaaacttcaaactgaattgatactaagttgcttcatgtctcacctcaaattgaggcaccatcaactaaattaagttatcctgccgataagcagagcaaggccgccgatcgatcgactgtaacctcgtcctgttgtatttattttgttcttataccggtaattttacattcgtactctagacgagaattcactgtttagaaaaatataaaattgccggcaacaccacatgatcaacaatctcttccaatttttgatgcgacaccaatccattttcaagcataaacgtatagcgaatttgctcaaaaagaatgagtttggtcgctttaggtgggaattttgtgatttccccccgttgtatggcccgttgaagaacgtcatccataatcttaatattggattccgttgcttcggccaacatctggcctgtccgttctcgctcctgctggttaatcatttcggaaaacagcattttaaacaatctaaacggtccattgttggactccaaaataaaatgttgcccaacatatactaaatgatcgcggagactgcccctgtcaaaatcaagattctcgaatttccctcccgcttgttgcatccgttgtcggacagcggcaaacactaaatcaaacggggtatcccaataacgataaaccactgaacgactggtattcgcctcacgagcaatacgcgtaaaattaatcgcactatacccttccgtttccagcaggcgatacgttgcttcataaatatcattttgtaatttgtcgccgcggcggcggcttttatttggttccgtcatcattctttctctccttgtacgttcattatacaccaaactgtatcttaaataaataagattcacacatgtatctaattgaccttttaagatacaatagtgtatcctaattataaaataagatacagaaatgtatttaaaggagaggtaataatgaaaactattgttttaggagcatcccatggaggtattgaagcagttgaggcattacgaatgatgtgtccagaagtaaacgttcaatggtatgacaaaggagacttctcctccacttcggccaaggatcttgaatccattcaacaacaaggagtaaccatcttcagcaacactgaaataacgaaagtagaacctggcaaacaccaagtggaaatattcgatcatgcgacaggggaaacgcgcaaggagggttatgacaaaatcattttaagtcctggtgcaaagccctttattcttcctgtccctggacatcatttaaaaaacatcggtacgatgagcagtcgacaagatctatttaatatgagaaaacatgctgcagatccaaatattaaaaacgttgttattgttggcgcaggatacattgggactggagcagcttcattatttgccgaatcagggaaaaaggttacgttaatggacatcaacaatcgtcctttaagctcctatttagataaagaatttacggatgtacttgaaaaagaaatgaaagatcgagatgtggaattggtactaggcaactcgatcaccgaatttgttggtgatgaaaatgatagagtcatcgaggttgtaactacaaaaggcacctattcagctgacttagtcatcttgtctgccggtaatcgtcccaacacggaatggttgcgaggcgcagtggaattatggccggatggcagaattaaaacagatgaatacatgcgtacaagcgatcccgatatattcgccattggggatgcaacaacggtttggtacaatcccggtaaaatgcggatgaatgtttcattaggaaccaacgcgcgccgtcaagcacattatgcagtaaaaaatttattcgaagccattcatccgcttcctggtgtacaaggctcttcaggggcgcatatcttcgattattatttcgctacaactggtttgaatgataaaacggcaaaaaagcttggcattgaaataaaatctgtttacttggaacaagagacgcccttgttttctccggagacgatcgttatgttcaaactggtttacgatccaacaactttagagattttaggaggacaaatcatgtctaaagttgatttgactgctactattaatacggtctcccttgggattcaaactggatgcacattagaaccattggcctatgccgatttcttctttcagccagaattaaacacaccatggaatgtaataaattcggcaggattaaaagcattactacaggaaaattactacaggaaatctagtgtatgaaaaggaaaaatccattgaaccgccagccttggccacctgacttccagagccaggtggctgactttttgaggttcatatttgcttcgcaaagtatttctttcgctgaagattatccaaacccagttcggaaatttgttcagccccagtgtcggcgatccggataaaatggcgcagcagattattggccgagtcaaccagggagagggcccgctacgtatggcgttgggcagtgacgcctatgaccaaatccggacagtccttttggacagactggccgctctggaagcacagaaagagctggcttactccacggattcagatgatgtggtaaaacccttgtaaaggacaccaaaaaattcggcatccacgataactggtatgctcctctgcaagtagccggtttatttattaaacttgcttacttaaaggggagcatttttaaaacttgccgttactttgatacagttctccgtttcaactacagagcgggttacgggacaaaccatccgtgttaatggtgaattcatttaggacgtgctgaaaactttatggtacgatttgaggaaacgattagagctttctgtccgttaaaatattgatttatgccagcgtatcacaccagcttgagggatataatgacgatgtattaagaagaggagagaaatcattttgacgattgaacgttttcaaatccaggtctctgatgaaatcctgaacgatctgcaatacagaatcaatcacatccgttggccggatcaattggaaaatgcggattgggaacggggcacggaattaaattacttaaaatcgttagtttcgtattggagggaccattatgattggcgcgcacaagaagccaagttgaaccgcttctcccagtttcgctgcaagatcgatgggatcgacgtgcacttcgtacatgaacgcggcaaaggtcctgaccctttgcccctgattctaactcacggatggcccgacagttaccttcgttaccacaaaatcatcccgctacttacagatccggccagccatggtggcaaccccgaggactcttttgacgtaatcgtcccttcattacctggctttggattctccagccgccctaaacacctcggggtcaacaattttcgtgtcgccgaaatgtgggctaagctcatgaccgaaaaattaggctacagtaaattcgctgccgccggcggggatataggctccggtgtgactagatacctggcggcaaaccatcccgaacggttatacggaatccatctgaccgatatcgggattatccgagatctcatagcttcatctgaccagggcacgctttcggaagaagaacggcaatacaagaataaggcttcggcatggatggctcaggagggcggctatatgtccattcaatcgacgcgcccccaaaccctcgcatatggactttccgactcgcccgtaggtttggccggttggatgacggagaaattccgatcatggagcgattgtaacggcgatcttgcgcaaaaattcagcgaggatgaactccttacgcatattatggtgtattgggtgacgaacaccataggatcgacagcgcatatgtattatgataatgcgcattctttgccgccaatcggctacatcgaggttccgactggccttgccctattcccggcggatatcctgttgccgcctaaggaatgggccatgcgcaacctgaatgtaacccgctggacttcgatgcctcgcggcggacattttaccgctctagaggaaccagagctttttgccgatgacattcgcgcattcttcagatcttttagaacgaaaagctggtgaatcagaaccgtttcgaaacaaatctaaatacactgtctagcagataataagaaaagtagatagatcgtggtcatcccctgatcctgcatcatgttaccgctcagttcccctgtcgggaaacgagcggcttgctcttgaccttgaaggcacctttggcggaatgacaatccttatcaaccacggttttgttacaaaaggtatttactttaattaaatacctttttaacaaagtcaataagcttggactttaaggcatcaccgtgctctcccctatggtacatatctgtgccgtgataaccactctcatccacaattagctctttatccgttgctccagatgcttgatataattggcgcacttctttttcaattgagcctccataatcgccaggtgaaaaaacaaacatggacggtgctttaatcttctcaacgctcggcattgaatcaaggggcccacattgtgcaggagaagaaagaataatcagcccctcaataggcagcgcctgacgaacgcctgcaatgattgctgtactaccgccacatgatgctcctgccaaaaatactctttttgcacccaatcgctcgagttcacctaaggctgcatctgcatcacgatctatattctgattatcctccggaaaattctgtgaggcaccgtgattacgatattcaggaataacaaccagatacccactgtcagccagttcagttcccatgtctagaaaagagcaaatgttatagccttgctcgtgtgcaagcaggactcctttatctccactgccaagcacaagtgcagacagatacaccccatcactggttgttaatgtagttgctttatttcgcagctcatccggaacacaagtattcacaagatgcccgttagaagacttcaccgaacggtccggccaggcaggatcataatcaaccggtttgtttggtggtatgtccttcacttcggcaactggtgtttcaggtacagcattttctacagatttcgtattttgaggttgatcagataaagattgattttcatttgaagatataggcattttggtggagcatcctgtaatcgttaataataaaatgagcaatacaaataccatttttgttcttttagaaaatacgttcattgattttctacaccaccaactattactgaaattataagtgattattgagcctattccattcgttctactacaaacccgttctgcatacagatttgggttaaggtccgcgtccaatgtcaccttgccatccgtaacttcgcatttggaatggcccattaaggccgaagccaatgtgctttttcacgtcccattagaccccataatcgcatgaatctcgccgccatgaacctccagtgtaagcccttttaaaatctacttcccgccaatcttggatcttaaatcctcaatctttaaggttgtcattctccctaacttcccttccgtagagttattcggcacgcgccaacaaatcactcataaattttccgatcgttcgtaactccgtctcagaataggattcgaaaattggtaaaaacttttttctggtttcttgaggtacgtcagcaatagaagtcaaccatatccccaaacagctgtttgataaattcaagctcacgttcgttgtatctttccaaaaactcgtacatccgttgcttttccttcacgtggagctcctcatgagcagcaaacagctttttgccgacaggcgttagccgaaaatacacttcctttttgttatcgttgagttgggcttttcgcacccaacctgctttaagtaatttatttgtaattttggaggtattccctttgcttacatttatcctttccgcgagggttgtgacattgattggctcccattcaccgatacacgcaatcgtgtgcagttccgtcatattcaaagtgaattccgattcaatatgcttccggatatcctccaggtatgtggcagttattcgagtttcatattgctcttttcgctcaagaaactgaacgaataattcatgaatggcgtttttgtttttattggcagtatccatgcttatgctcgctccttgacttatttattatattatatcatagattgttttctgggaaacaaagagaaacaaatggatatgcttatgttgagatgggggttgacaggataaagagtgacccagtacactattattgtttcatatgaaactaaaattatatataacctttatcacgcctttttttataagcaataaaagagtttccaaagaaacaataattaatgaaggaggtgcataccggcctatggaaatcgtgaatccaaagacattgacggaaaaggttacatctgtcatttctcatgttgtggtaacgactgcctccaaactggccttcatctcaggtcaggtttctgtggatgaaacaggatcattgatcggttcaggggactattacacgcaagcgattcaagtgttcaccaatctcaagtatgcattggaagccgtgcgggcggatccattgtacattgcaaaaatgaatatttttgtggtaaaccacaacccggaattgatttcgattattttcgaggcaggatttcatgtgtttggccctaactggccgaagacagcaagtacctatataggcgttcaagcgctagccgatcctgaatggcttatcgaaatagacgctatcgtgatcttcccataatgtttaagaaaagaggttattgatatgaaatatgaagtcatccttatcggtggcggtcctgtcggcatgatgttggctggggaattggcattagccggtgtaaaggcctgcgtcattgagcgactaaaggagacaactccttattcacgggcgcttaccgtacatccacgcaccctggaaattttagatatgcgtggaatgaaatcacaattaatcaagcaaggccgtttactttcgagaggccatttcgccggactagaaacccccttagatttctcggtattggattcctcttccaatcacactctctttttaccgcagagtgagacggagaaggtgctggaggaatgggcgcttagccttggcgcagaggtccggagagaggttgaggctctatctgtgcaccaggatgaggatggggttgacgttaagatcgccgggcctcatggagaaacaacattacgatcagcttatgtggtaggtacggatggagctagaagtttggttcgcaaacatgcaaatatatcgtttgaaggtacagacgcgacattcacggctattctgggggatgccgttctatctgatttggctcctatgagtgtcatctcccggattacagaacaaggcttggtcagcatcatgccgatcaatgattatttctatcgggtcttgatgatcgatatggagagacgtaacatctctaaggatgaacccgtaacattggaagagtttcgttcatcgctcatccgtacaaccggaagcgacctaggattgaacgatgtgaaatggatgtcccgtttcggaaatgcgacgcggcaagcgggacgctatcggaatggtcgaatgttcttggcgggagattcggcgcatattcattttccggctggtggacagggaatgaacgttggcttacaagaagcgatgaacttaggctggaagcttgcaggggcaatcaaaggctgggctccggactggttattggacagttatcatgccgaacgtttcccatggaatacggctttgctccggaataccgaagtccaaaccatgcttctggatgtgactcctcccatcacggaactgcgaagcatgctggctgatctgattcaaataccggaggctaattatcaaatcgctgcacagatttccgccctagatgtacattatgcacccgacgccgaagccccttcccatcctttaaacgggaaacggttcaaggatcttcgcttaaagctgaaagacgggcaattgataaacgcctattcgctcctgcacaaaggtacttttcttctgttgcatttccattctaatgaacagaatagcagtcaatgggaaacgtatagcaaccttcaagttgtacatgcctctttggctgatgctgatgcggattggaacgacgtccatacagcgcttattcggccggatggacatattgcctgggcgatttctttatccgagccaaatccaatgcaaaccataaacgaaggaatcactcgctggtgcggagacattacggattaggaattcatttgaggtgtgtaaccgcctccctacccagctagggccaggtctgtagatgattgaacaagcactgtcctttccatcaatggaatcaagttcttgtcttcaggttaggataaaactggattccttaaattcttccaattctgcagaacccatcatcacagccttgatcctgcgctttaccactatttgtgatacggttctcctcgtgtcttttagttgtcatgcatcatcttccgaaactagaagatgatgcattttagtcgtttgccatcaagtgcaacttcaattcattaattgcatgcctttttaaacttcatccagatactctccgataccttgactgccggcactcattcgcgccctcaagaacgtcactattacgatcgcaatagcgactccaaccactccgacccatgtaatggatgatagagacactcggtcgaccataacgcctccgattgcagcacccgcagccatggacaactgcatcatggattggttcagacttagcatgattccagaataattcggttcaatccgaactagattgacttgttgcgttggaccggaagaccatgccgcaaacgaccacaaaatcaagaggatgacaatcggcagccatgcatgcgtataggtaacggttaaagagaggagaagcagcgctatgacgtgcaagagcatcccccctgacagtgtcgggaataccccccatttatccgtgctgaaaccgccgaatttggatccgagcaggctagcgatgccgaacgccaacagcactccactcagcatcccttctttcaatccggcaacatcaagtagatacggtgaaatgtaggtgtaggcaatcgagtatccgccgagccagaaaaaggtaatcgcaagccctagcgctacgtttccttttttcaaaagggcaagttgtttggacaatggaatcggtttatccccttgaattcgagggatgatggcgtacagaacgaacatagccaccagaccggccagtgccaatataccaaaaacagctttccatccaaactgtgctgcaacgatacgtcctagaggcacgccgataatcaaggaagccgtaaagcccatgaccacggtagcaatcgcgcttgcttgtttgcctggagcagcaatttttgcggcgatgtccaaagcagttaccacgaccattcccgcgcctagagccatgatgacgcgagctgcgagaaacgatgcatagccaggcaaaacgaatgacagtacattcccaattacgaagatacctagcgcccaaaccagcagtttttgtctttccaccttagcagtcaacgccatcaggatcggggtaccaatggcgtatacaaaggaaaaaatcgtgactaactgccccgcagaagtaacggaaatacccattgtatccgagattttatctaagatgccagaaataacgtactctgatgtacccactaaaaaagtaactaaagccaataaatagactttccacgtgttagacaatgcattcacttctcctttttttattgtttttacagttaccgatatgaggatcctttttaatttacatatcgcgatatgtcgatatgtaaggccgaaaaactgaatacgtttaaggtattcagtatcagtattcagttcagattagagtttctgattcaaatatgcagccaactcactgatcttctcttcatctcgtttgtagtacgtgtatttgccgatccgctcagttcgaatcagtccggcccgttgtagaatgaacaaatactgcgatgctgtcgactgtgtcatgttcaacttatccttcacttgactgacacacaccccgattttcctcatatccactccttcatggggcacaaaatgtttttcaggctccttgagccactgtaaaatctgtaatctcgactcgttagacaacgctttgaatacttcaattggatccatgccttttattatatctacattttgcgatatgtcaatcctaattatttcgcttctactctcgctcattttattcctctatggcgatgccggcagctcttaagtgcccataggcaacgattttactaaactgagatgaaacctcctctgtagaaaggggcttatcgtttttaatccaccaaatgacaattcccatgaaagccgatccgaggtattcgatcagcaattcattggatatcgctaatggggcgttttcctgagcaggtttccacccctccattaatttatccttaatgatcgtctccattttcgcttgaaacggatagattcgattctcttcaattaacatggaacggtaaaaggtcatgtttagagaaatatgctccagtggcgtttgataacttctcccttttttatttgctgtgcttttggataaagggttttttaagtatccgaagcgaacgatcagtacgtgtaggcagttcatacagtgcctaacaagttaaaggaacagtaggaaacaaatcagcatctaaggattcatactgtaaagattacattggttatatttatgtgatgttatgcgggagcacatccagctaatatggtaccggtagccggggtattacatttattgtaaatccttttattataaagatgataggaaccgtatagaagtaaaactggaaacactgtaatcagcattgccatataatgaacaataatttgctttataaagctccattgttttatttgatatatcacgctggctagacctagaaaaaagattactagactataaaacagaaaagtttttgccgtggctgcagatccatgtaacatattccatattgaaattattaatagaataacaaaaggaactaaacctctaatcagccctttaaaaaatagttgcattataaaattcctccattacctacccattttacttcagattcccaaagaattttctagattattaacttttataaattatcacaaatatttaaaaactccaaaaagtatactgtgtaaccgcacacaggatgatagtgaatcctctcattacttttaagccttcgcatagatgttgcttctttctagcttcgttttgtttggccaatattcctcctggccctgtaccttttttctctctttattgtacaaaaaagcctgccgactgtctcggtaaaatcgagactttgtcgacaggctgaagctccctacaaagtagaaagctctcgtgtaataggcattgctattacttaggtttggcacctaataccggtggtcggggtcgaaccgacactcccgaaggaacacgattttgagtcgtgcgcgtctgccaattccgccacaccggcccattttttgagaagctaggttgctctcatcaactgacaagaactaatatgtaagatggtcaatactttttaataaaaaaataaccatcagtataaaataaattagagagcagcaaaaatgctgctctcctatacaatgaatggttacttgataaaacacaaagcgacaccatatcccttgtcctcatcgtacgcttttgtaagacgcatgacttttatcggtccattttctcctggcacgcctattccaccgttggcttttacataatctcctggctggacggagtcagagacacggacgtgaatttggcctgttagcccgacgatattccactcttggcgtttactgcgtggagtgtaaggcaggcttggatcatattggggattttctaacggcagttcaacaacctcttctgtatacgtaggaagcgtattgccgtcttcatcgacatcatacgtgcggattgtttgtggctcatagaccatgccgccaaactcgttagttaaatatcggccttgccaataaagtgccgattctccaaggaccacccctgctgtttcagaaatagcgccaagaatatcgtctccttcctcagccacgcggattttatctccatcaagagtgacaagcaggccagtggcaatggggtttccatctatgctttcgaagtactcggcataatcggtaaatgtctgtgcacttgaaagcgtgcccgcagctcggactgtaccagtacggctattaagctcccacttgatattggcgctgcttgggttgcctgaagccccatacccgccgactacagaatagccatttgggttggctactaaattactcgcaagtaccatcgagctaaacgcccctcctgactggccagcaaccgcgccgctggagctaaggatgccgctccgaggcccttgcgcccgtgaattgcctgcacttcctaggacgattgccccttcgccaactgcgtgggaattagatgaggcagccaccatcgttttagaagctgaagctgttggcgacgaagtgctagcaagtatgatcgattgttcggtggaaggtgcccctgtacttgaagcaatccgtgcgcctcctttaatcactgtaattggctctttataggccacaccaccgctgcggacagcatacttgtatccagtcacggatacaccgctaatgttgacagagtttgtcgccgcttccactgcattttctccctctcccttagaattaattgcattgacattggaaatggagacgttgctatgtccgctgccgacgtatattccgttatttttgcctgcatcataaatatgaatatttgacaaggaaatgtggtcgccacggtttcctccaccaaatacaatgatagcgtcgctggcgttatgaaaacggcttacgttaatgccgttaagggatacatttttcgctttatattgaatcgcaatgacaggcgtattgccaaagtcgtaggatagatcgccaattgccgtaaagttggtaatgctaacattggtataagcgctaatcacaagagcacggggatctgtattgttctggaaccccctttttttgtttgggtgcagcgatacgagattagtagccgtaatatgataggccgtttttgagtcaggatcatcgccggtatgatggccgatatggcggaagttatagctacgtgtgtcttccctagaaatatgcccaagaatatggacattgttcgctgcactggagttggcatgggctttaatttcaatacccccataacaacccatagagtaattgtttgatagaagcacatggcggcttccgtcatcgatctcaattccatttgcatttcctctactgttaggttcataggcatagcaattggaaatggtgatgtattcactatggtgagtggtaaatccatcatcgatccagtcagttgctttacagccatcaatccaaacatattgggaaggccccgaatcaacggtcccatctccaccatagtggtaatctagaccggtcgacgtaacgtcaaatccatgcaacgtgctgttgtaggcaaatacatcctttacccagccgtactttacaccatggaatgttaagcaactggaacggctacctccggctggctctacaccccttctgcggttaccgtctaagcttagatgacgaacggcaatatactcggcaccattgtccttatcctttaccgacaccgtccattcataacttggcgcatgattaggcgtttggatcgttgttaattccatcccttgcccttctaacacggttcgacttggtagcttgacagtggcataataccgttttggccctaaaatcagtttgacatttccgtcgcctaacgcttcttcaaaatacttcgtttggtcactttcttcttccccttcaggaataaagtcatcgatgtaaactatccttgcatcctcaatttgttgcagcgttttcgtcaaatgctcaaaagccttgtcctcttcctttgcctcgcatgtttcccattcgtcgtttttcataaaggaaaacgcctccttcttttattctgctagtaaaaagcagttacgtttaaaagagaaggaagccatctaaaaacaaaaaaactgacattaaaaatgtcagtttgcatacgcgcccgagaggattcgaacctctaaccgcttgattcgtagtcaagtactctatccagttgagctacgggcgcaattttcttcatgtcgtttcataagatgccgagggccggactcgaaccggcacggtagtcacctaccgcaggattttaagtcctgtgtgtctgccaattccaccaccccggcctatctaggactacaacttatttttaaattggaggcggcaaccggatttgaaccggtgataagggttttgcagacccgtgccttaccacttggctatgccgccgtaaaaactaaagcggaagacgggattcgaacccgcgacccccaccttggcaaggtgatattctaccactgaactacttccgcatatggctgggctacctggattcgaaccagggatcacggaatcaaaatccgatgccttaccgcttggctatagcccattgctatttaaatggggcggctgatgggaatcgaacccacgaaatgccggaaccacaatccggtgcgttaaccacttcgccacaaccgccatattgatacatgcttaaacgattcaagttggcaggggcagtaggaatcgaacccacactggaggttttggagacctctgttctaccgttaaactatgcccctatgaaaatggtggagggggacggattcgaaccgccgaaccctgagggagcggatttacagtccgccgcgtttagccacttcgctacccctccagtttcaaaagacaatacttatcatatccataattgatcaaaatgtcaatgattttttgataagtgatgccggccagaggacttgaacccccaacctactgattacgattcagttgctctaccaattgagctagaccggcccaaatcgtatgatggtggctcgagacggaatcgaaccgccgacacacggattttcagtccgttgctctaccaactgagctatcgagcccttctacttaaatggcggtccggacgggactcgaacccgcgacctcctgcgtgacaggcaggcattctaaccaactgaactaccggaccattttttgtttttgtattggttgcgggggacggatttgaaccgccgaccttcgggttatgagcccgacgagctaccagactgctccaccccgcgtcgttaggaataaatgaaattttgctgtactattggttgatagaggaggctgtctcttcctctgctagctttttcggggatgtttggtgcgtcgagacaactcgcttgcgctcgttgctccaccccgcgtcgttaggaataaatgaaattttgctgtgctattgattgaaagagcatggctgtctcttcctctgctagctttttcggggatgtttggtgcgtcgagacaactcgctgcgctcgttgctccaccccgcgtcgttagaaataaatacagattttacgttactctaatttgattgcgatggtggaggatgacgggctcgaaccgccgaccctctgcttgtaaggcagatgctctcccagctgagctaatcctccatcatttcctacaattctatttattctcttcaaaaatggtgacccgtacgggattcgaacccgtgttaccgccgtgaaagggcggtgtcttaaccgcttgaccaacgggccttttatgtatgatggcggagagcgagggattcgaaccctcgagacggttttacaccgcctacacgatttccaatcgtgctccttcggccaactcggacagctctcctaatggctccacaggcaggattcgaacctgcgaccgatcggttaacagccgatagctctaccactgagctactgtggaacgatatgtaagcccggcaacgtcctactctcgcaggaggaagcctccaactaccatcggcgcaaaagagcttaacggccgtgttcggcatgggaacgggtgtgacctctttgccattgtcaccggactctacttcagataagcttcggatttcttcgtccagttcgtgtctctcagtcggtcacgtacgtttgggtacgctcccttcttcgagcactcctgtcctcgaactcctcgcttctcttcgtagttctnnnnnnnnnnnnnnnnnnnnnnnnnnnnnnnnnnnnnnnnnnnnnnnnnnnnnnnnnnnnnnnnnnnnnnnnnnnnnnnnnnnnnnnnnnnnnnnnnnnncacggcagatcaccgtcgcatctcttcgtctggttcatgattctcagtcggtcacgtaggcaactacgctccctccttcgaacatttcccatcctcgacctgctcggttctctttgtgaaacttttttgcttcagatcagcgacggatctcttcgtccacttacgttattctcactcggtcacgtacactcgtacgctccctccttcgaaaacgtgtgtcctcgatctccttgctgctcttcgcaaaaattaaaaaatacataaaaaggtatgcattgaattcttgacgtccccattcggaaatctccggatcgaagcttacttacagctccccgaagcctatcgcggttcgtcgcgtccttcatcggctcctagtgccaaggcattcaccgtgcgccctttctaacttatcctttttcacggcagatcaccgtcgcatctcttcgtctggttcatgattctcagtcggtcacgtaggcaactacgctccctccttcgaacatttcccatcctcgacctgctcggttctctttgtgaaactttttagttttcaaagaacctgagagagtaagtcctctcaaaactgaacaaggctactgatttcaattacatcatgtaacacttctcagtttatgcttcgtgctgccttgcgacgagtaaccgcaggagcaacgatgtttcctgcgacgagtaaccgcaggagcaaaagcattttaatcgagagttttgagtcctctcaaaactgaacaaatagcctaagcgctatatgaccagaaggtcatacatcgactagagtaaaaactccatagaaaggaggtgatcnnnnnnnnnnnnnnnnnnnnnnnnnnnnnnnnnnnnnnnnnnnnnnnnnnnnnnnnnnnnnnnnnnnnnnnnnnnnnnnnnnnnnnnnnnnnnnnnnnnncacggcagatcaccgtcgcatctcttcgtctggttcatgattctcagtcggtcacgtaggcaactacgctccctccttcgaacatttcccatcctcgacctgctcggttctctttgtgaaactttttcgcttcagatcagcggcggatctcttcgtccacttacgttattctcactcggtcacgtacactcgtacgctccctccttcgaaaacgtgtgtcctcgatctccttgctgctcttcacaaaaattaaaaaatacataaaaaggtatgcattgaattcttgacgcctcgttcaaacagttatacaaccgatgaacaaagatcaatttgagttatttctggatttagttttcaaagaacccgagagagtaagtcctctcaaaactgacaaggctactgatttcaattacatcatgtaacacttctcagtttatgcttcgtgctaccttgcgacgagtaaccgcaggagcaacgatgtttcctgcgacgagtaaacgcaggagcaaaagcattttaatcgagagttttgagtcctctcaaaactgaacaaatagcctaagcgctatatgaccagaaggtcatacatcgactagagtaaaaactccatagaaaggaggtgatcgatcaccctctcaggtcggctacgcatcgttgccttggtaagccgttaccttaccaactagctaatgcgccgcgggcccatcccctagtgatagccgaagccatctttcaccctctctccaggtggagaaagggattatccggtattagctccggtttcccggagttatcccagtctaaggggcaggttgcccacgtgttactcacccgtccgccgctaacgtccgggagcaagctcccttctgtccgctcgacttgcatgtattaggcacgccgccagcgttcgtcctgagccaggatcaaactctccgttaaaaagtttacttacacacggatgtgttggcttcggtgttgcgacaggacgtcgcgaccttaaccgaagatccttagcttcattgcacaaccgaagttgtggctcactatgattgacgagataccttgtatctcttttacgcttggcttttgttcagttttcaaaggactcggttgcgacttcatgatcttaacatagcgaagaccattcagtcaatttgtttttcaatgaatcgccagttcgttggcgacatgaaataatatatcatggctacagaaatcggtcaacactttttttgaaattttttttgggaatgatctccttctatttacagaagcgctttaacgagatcggttaacctatgttatactatactcgattcgttttattgaatgtaagttgctatttcagataaacaccaggagggcaagcaatgaagctaaagtatacaaacaaaatcaacaaaatacgcacattcgcactaagcttagtgtttgtcgggatcctcattatgtacgtcggcatcttctttaaagagcatccagtcattatggtcatcgctatgatactcggttttctagccgttatcgctagtacagttgtctatttttttattggccttctttcgacgcgggcggttcctgtcatatgcccgtcatgcgaaaagcaaacaaaagtactcggccgtgtcgatgcgtgcatgcattgcgatcagccactaacgatggaccgttcacttgaaggaaaggaatttgacgaagcttataactctcccgcttccaaaaagtcacaaacataaaaacggtatagaaaggaaaagaggaaagagcgctggctatttcctcttttttctttcctatcaggtgcccttaacgcgcttttttgcaatctgggcatacgccgtaaatttccatgcgatgattgtcaacttcaaaacctgtcacatgctctgcaagggtttccacttcatctagtccaggataatggaagtcaacaattttaccgcattgcgtgcaaatgacatggtaatggttgcttgtcacgcaatcaaaacggcttgaagcgtcgccatacgataactcttttacaatgccaacttccttaaaaacacgcagattgttatatacagtcgctacgctcatattcgggaagcgcccttctaatgctttataaatttcatccgctgtagggtgtgtcattgattcatacaaaaactccaaaatcgcgtggcgctgcggtgtcatacgcactcgtgtgcttttaagcgcatcaattgcttccgataagcctcgattagccatactatgcgcctctctttcggaaaactattctttctttatattaattataagttgtaacttggctttaagcaagagcaggcaaaaatttgctgtttagatgcaaaagaaccaccctatatgggcggttctcagactagaggcaaacaccaagcatctgctcattctattcagattgcactcttcgcctgacaagcgtttttgatcgtgttcatgtttgtacgaacaacggtgttgcgtttgcagctggaactagaaaagaggtataacgatgtgtttttttatcttttcgctgccgctttgattcaacatttaagcatgcattttttagagcagcttgaagctgttccaagtccgattcatgaacgccaaacaaaaacgttgtgctgccctttcttaaaaagccgcctgaactagaaagttcggtcatccgatacccttgtttgcgcaaatctttttctacatcatcagcgtaaaaatcatcaataatgcatactaacagcttcatcgttttgatccctccctttagtatcctttttcaaaacaaacgatgtttttaagatcctcgttgtttataaaggcttttaaattttccataaaaataacaagagctcttttcatgtaatgggatgttgctgccgaaacatgaggggtaatcgtcaccgccttatcgtcccacaaaggtgaatcaaggggaagcggttcttctgcaaaaacatctaaataagcgtgatcaatttgttttaattttaatgcatcgagcaaatccgtttcaactacggattttcctctacccaaattaataaatactgtgtgccccttaagttgcctaaacgcctctttattcaaaatgccatgcgtttgttctgtataaggaaggatgttgatcagaacatcagccttcctcaatgctttatcccattcttccatagaaaatgtctgctcaaaatgtttttgcggacggccatctgtattaacgccaattgttcgcataccaaacatgttggcccgttcagccgtttttgaagcgatggcgcccgtgccaagaaaaacagctgtcatcccagtaagttccttcggcttgatgcttttatcccattgtttgttttgttgcaacatccgataacgagtagcgtgttttacataatcaagcatcgcccaaatagcgtgttcggacatcggctcagcatgaatgcctctgctattggttaccaacacgcctctatcatgcaaaaggcgcagaggcaacccttcaatgccagctgacatgacgtgaatccacttaagtaaagacgctttgctcacaagcgattccgtaatatcgtcgccaaacgtaacaagaacatccgccgtttttaaaatttgatcgctaggaactccttttttatcaggaaaataaaaggacgtatttgcaaaagagtgtttaagtagctcttgcctttcctctgtttgtttcataaagaaaacaaccgatgcgttctcactcatcattttgtcccttaacaaaagcgagtacatcttcaacatggtttttcacttttacattgcgccattctttgagaaccgtaaagtctttgccaattacaaacgtagagcgaacaatgcccatgtactccttgccaaagttctttttaagctgccaaactccgtacgcttttgcagcctccaagtcctcatctgccacaagcggataaggcagaccatgtttttcggcaaatttgtcatgtttgtctgccggatcggggcttacacctagtacgatcgctccctcttttttaaaggcttcagtttggtcgcgaaaatcacacgcttccgtcgtgcagccaggggtcatatctttcgggtaaaaataaaggacaatgtaagagcctttgtaatcagacaaacgaatcgtctttccgccatttgccggcagttcaaaatcaggtgctttttctccttgtcgtaccattctattacgctccttttcgatcagttactctctcttaaaagattagcggaattggcgaaattcttcaatgaagagatttttctgttggcatatgcccttttctctgacttgctataggacatatgctatgataagcgggagaagtttattagcagatggaggtccttatgaatcgcaaaacatcagaatccctttaccaggaagctcaacatgtaattgtaggtggtgtaaatagcccttctagagcctacaaaggagtgggcggcggcacgcctgttttcatggaaaggggagaaggtgcctatttttatgatgttgacggcaaccgctatattgattatttagcggcatacggccccattatcaccggtcacgcccatccagtcattacaaaagctatacaagaccaggccgccaaaggcgttctttttggcacgccaactcggcttgaaaatgaatttgcacaggaactaacaaatgccattccatcccttgaaaaagtacgctttgtaaattcgggaactgaagcggtcatgacgacgattcgcgtcgcaagagcgtatacaggcaaagaaaaaatcattaaatttgctggatgctaccatggccattctgatctcgttctcgtagctgctggatcaggcccttctacactcggcactccagactcagctggcgttacagctgcaacggcaagtgaagtcattaccgttccctttaatgacatcgaggcatttaaagaagcgctagcccattggggaagcgaaacagccgctgtccttgttgaaccaatcgttggcaattttggcattgtcgaacctgagccaggctttttagaagctgttaatgaccttgctcatagcgccggcgctctcgtgatctatgatgaagtcattacggctttccgctttatgtatggaggcgctcaagactacttgaatgtgaagccagatatgaccgctctaggaaaaattattggcggcggattgccaattggcgcatacggcggccggatggatattatggagcaagtcgctccacttggacccgcctaccaagctgggacaatggccggaaaccctgcatccatgagcgcaggtattgcttgcctcgaagtcttgcgaacagaaggcgtatacgagaaactcgatgaacttggggcacgccttgaagaaggcctctatttagcggccgcaaaagcgaatgttccgatttcaattaaccggttaaaaggagcgctaaccgtttattttacagatgagcccgtcattgattatgaaggagccaaacgttctaacggcgatcaatttagcgtctttttcaaagcgatgttaaatgaaggaattcacttggcgccttccaaatacgaagcttggtttttaacgattgcccatacaaaaaatgacattgatgaaacaattgaagctgcgtaccgttcatttaaaacagtcgctgcggatttctatagctgatcagcgcatgaaacagccgcgactcaaatatactagaaaggcccagaacggaatgccatgtttttaaactgagaaaggacaatgcgatacatgagactaggagctcgtatcttgaaaacggggcttgcagtcgtacttgccctttatctggccaattggctccaatttaatccaccgacatttgccgcgattgctgccgctttcgcgattcagccttcgctgtttcggacattgcggactttcagccaccaagtgcaagccaatttgattggcgctattattggtgtcctctttgtaatgacatttgggcatgcgcctttcgtagttggtgttgtagtaatgctttccattgcgatctttattaaattaaaattggagccggctattattccaacagcaattgtgactgtgatcatcatcatggagagcccgtccgataatttcctagaatttgcagcacaaaggtttatccttgttttgataggcatccttgccgcttttcttgtgaatttagcttttataccgccacggtatgagaacaaagtttacgacaagctgtcttccacgacagacagcttgctcgagtggctagaacttgttgcccgccgtgaggctgactcgattgctttgcgtgaagacatgaaagcgcaaaaaaaccatttggataaaacaaatgacttgtttaatttgttcagggaagaacgcaattattttcgctcgaaaacatttaaccaacgccggaaagtcgtcgtgtttaggcaaatgatttctactagcgaaaaagcataccgtgtcttggaaatgcttgagcatcgctctgaagactttagcaatctccctgaccgtgtgaaaggcagaatcgaagagcaaattacatcgttgaccgattaccaccgccgcattattttgcgttacaacgggaaggtcagcaccaatgcccttgaagattatgtgaacgaaattgaagaagggcaatcgacaatgacgaatctgtttgttactctttatgaagaagaagcgtttgacttggctcaatggcattctttcctgccggcaatttcagccattattgaataccagcaagagttagagcaccttgatacgcttgtcgaaaaccaccaaatccacacaactgaagacgatgcaaatacgtaaaaaaaccgccttttaggcggtttttcagactgtagaaaaacgctcgcatacttcgtcgtttgcctcggtcatatgctcatgaacccacgttctattcgcatcttccctcgcctgcactcctcgtctgacaagcgttttctatcagcctgatcctttacgcttccaattcttggacgctgtatagtttgtaataggaaccttgcttttccattaattctttatgagtgccttgttcgactacttttccgtcgtctatgaccacaatcgtatcggcattcgtaatggtcgacaaacgatgtgcaacgataaacgttgtccggtctcgggccagcttttctagtgcttcttggataaaatgttcgctttccaaatcgagtgctgacgtcgcttcgtcaaaaacgagaacaggtgggttttttaaaaatacgcgggcaatggcaatgcgctgcttttgccctccagatagtttgactccccgttcgccaacttcagtatcatagccattttccagcttgcaaataaattcatgggcgttggctgcttttgctgcctgaatgacttcttcatctgttgcatcaggctttccaattttgatgttcgattttacgctgtcgctaaacaggatattatcttgcagtaccatgccaatattgtcgcgcagacttctcacgacgaggtcacgaatgtctttgccgtcaatcagaatccggccttttgtaacatcgtaaaacctcggtatcaggctgacgagcgtgcttttccctccaccgctcatgccaacaagggcaaccgtctgcccagctggaatgtttaaatggatatcttgtagtgccgggtccgcttcattgtcgtaggaaaaggtcacatgttcaaatgtcacagctcctttgacatcagtcaacacatctgctccttctttgtctgtaatatcgtatttctcatcaataaactcaaaaacgcggtccatcgaagcaatggactgtgttaacgttgtcgatgaattgacaagccgccgtaacgggccgtatagccgttccatataaaggacaaaagcactcatggccccgagctctaagctgccatttagcacaaacagcgccgatacaaacagaacaagaagcggggcaatgtccgtcacagtattgacgacggcaaacgtttttgcgttccaagccgtatgatcaagtgctttcgctaaaaagcgttggttgcgaacagcaaattgcttttgttcatattcttcattggcaaaactgcggatgacattcatcccttggacgcgctcatgcaaatggccttgtacatccgcaagcgcttgtgaacgagtccgcgtcagcttccgcaaacgttggtaaaaatatttaatcgaaaacccgtaaaacggaaacatcgaaatagcaacaagcgtcaaccatacgtttaattggagcataattgcaatcgcgattaaaatcgtcgccaaatcgagccatatgttcataaggccagtgatcacaaagtttttcgtttgctcgacgtcgtggatgacccgggaaatgacttcccccactttgcggtttgagtaaaagcgcaaactcagcttttgaatatgcgtgaacaagtggtcacgaatatcgtatagcactttgttgccgatccattgggcaaaatactgcctgtagtattcaattggcgggcgcaagacgataaacaaaaacgccatgccgccaataatccaataaagttgtgaagattgttcagcaatagacaactcttcattgagaagaacatcgtcaataatgtacatcatcgcaagtggaaataacagcgggatgccaaatttcagcaacccaattaaaatcgttccaataatttctttgcggtatggctttacaaacaccaaataccttttgattgtcttcaagtaaaccccttctttttctataaagaaagcctgaaggctcaggctcttagcggtattgcaaataccgttcgtaccagttttctacaaattggggcgcaaacggcccttttctctggtgaatccacgatataagctcgtctacactttttcgtaatataacatcaagttctggcggatacttcatgagcttgctatgcagttcgtattcatcttcatcgagcagcttcatcgtcatatccggatacactttaatgtccaagtcataatcaatatacttcaacgcttcttcatcccatgtaaaaggcgttccaagattgcagtagtaataaatgccatcagcgcgaagcatgcaaatcatgttgaaccattgctcggcatcaaaataacaaatcgctggttcacgcgtccgccaatttcttccgtccgcttccctgacaatgatacggtcatttcctgctactacgactttagacgttcctttcaacacaatcgtatcttcccaaatgcggtgaagcttcccattatgcttgtagctgtgtatctggatagtgctgccttccttaggaaagctcatagcgggctcctttctctcaatttccacacacgcagactcttctgctatccttcacaatttgaatgtacatcctctattatacaaggttcaggtcgtatttaaaacgttaaggctcgcaaaggcaaaagtagcttcgttttgacaaaaaaagacaccccttaacctagttggcaaagggtgtctttttgcgccaaagcgctcgcgtttcacaaattattgttggttctttttagctgctgattgagcgttttgttgttttacttcttgtacgtctgtctcgctcgcaaattcagcattgtatccttgttcagaagcttggttttgcttctttacttggtttttgtttgtttttgatgctttgtccatggtttatcacctccacgctatatacttttcccgtggagtttttttctatgcaaaaaaaaataaaacgttatgccagcaaggagataccgccatccacgataatcgtttggccgcgaatcatacttgcttcatctgacaataaaaacatggccgctttggcaaggtcctttggttctacgatccgccctgcaggagtccgctctgctgcatcctttagcaattcatcccggtttggaaagtgtgtcaatgcatctgtgtccactgctccacccgaaacagcattgacggcaattccttttggcgccagttcaacagccaaatagcgcgttaatgattctacagccgctttagacacgccaacggtcgtataattctccaaataacggatggcccctaaagaacttaggctgacaattttgccgcctccggttttttccattctttttgccgcttcttgggcacaaaatagcagtgctttggcgttaatatccatcgtccaatcccaatggctttcttcaagctccatcagcggccgtaacacaccagaagctgcgttgtttacaaacacatcaagacgcccgaaagtgtcgtcaatttgttcaaacatcgctttaattttttcctgcttgccaacattggctttgacaacaagcacgtccacgccaagtgcgcgaatttccgctgctgttgcttctgcgttcgagcggcttcgtgcgtaattgattacgaggttatatccttcttttgccagggaaatcgcgatttcttttccgattccgcggctgcttcctgtcactaatgccactttcttttccatgtctacacgctccttgctaagtcagtacgatttatccattataacgcataggcaggcgctcgaacagccaaactacacgaaagcacaggaaaggagcattttagtgtgtatgacggcagggatttaaccgagttggaaggcatttcgccacacatgtggacagacgaagaacttgcttttttccaccacggaatgcaacaacttagtgcctatttgaatatccaaggaaattcgcgccacaaccaaattttaaaagaaattgaacgccgcggcggcttgcaaaaagtagaccaatccttttcttaacagggaggtaataagatggataaacaattgtattacgttaatttaaatccgataagtatggacacaattagcaacgtgcgtgtaaatgacggccaattaattgaatacgaaattgcggccactgaagaagagaaaaaacagtttgaagacttgctcaggcaagtcaataaacacgatgttgagctcggcaaccttttctcatttagacattttgacgaacgtgccggcgatgccgataaaaatgaatttcaagttggcatgaacgatgtatacgaacgcctataccaacttggcaccgaagaaacaaaagccaaaataaaagaaattaacttgctgaatgaagacgacacagagcctggcatctaaaaaacacaccgcggtttcggcggtgtgcttttcctatatattcgattttgactggccgccgtctaccactagtgtagctccagttacccagctcgctttatctgatcctaaaaacacgacgacatctgctacttcttctggagttccaaaccgaccggccggaatgtcacgattcacaaattcggtgatcccctctggatcggcatcaaggcgtttttgccaatttccagtcggatgaagtatcgagcccggggctatgctgttgacgcggatgccttgttttgccgtctcgtcagcaagagcttttgtgaaactaataagcgccgcttttgcgctattataagtcgctttcccacctgattcacgaccaaatatagaagaaatattgataatcgttcctctccctgccgatttcatcgctggcagtgcaagctttgagaaatggacagcagagaaataattaagctcgaacgcttcataaaacacatccatcgccgtttcggaaattgctccgccattgctgccgcctgcattgttaaccaatatgtcaatcggtccgatcgctgctgacgcctcagcaaacattcgctcacgctcagccgctttggtcacatcgccgctaatcgtttgaatacctgctagtagtccctctatgccttctgtcacccttgcacaaacagccactttggctccttctgcagcaaaagcattggcaattgctttgccaatcccttttgttcctcctgttacgaatacgcgttttcccgttaagcccaaattcatagccatccctcctccaaacaatgattcaacaatttttgctgtgaaactggaaaggcatactgctctagttcttccgcttttatgatgcggcaattcgccggtagttcaccatttcgattcgccctgcctacgtacaactcaatttcccaaattaaatggctaaatatatgtttcacttgaaaattagcagcactgggctccgcttctatatggtatttttcagccaacttttgttggcgctcccctggatcaaaccgtccttcaagcacaggaagctgccataagccagctaatagccccttgtctggacgcttttcaatcagcagttcgcccttttctgttttcaataaaaacgattcaagctcaatcgattttgcttttttctttttcatttttatcggcagccgctcttgttgtcctcgttcataggcgaggcattgcgttcgcacgggacaaagcaggcagcctggcgaagtcggtgtacacacaagagcgcctagttccattaatccttggttaaaacttgatgggtcgctcttgtcaattagttcatataaaatcgcttcatgcttttttctcgtttgcggtttgccaatatcatcttccatgcaaaaaacgcgcgacaatacacgcatcacattgccgtcaacggcaggttctgcttttgcataagcaatacttaaaatcgcaccggcggtataggggccgactccttttaattgttcgatttccttgcgcgtatcgggcacgacgctgccatagtgttctacgacttccctcacagcggcctgtaaattgcggacacgggaataatagccaagcccttcccatactttcaatatctcttcctcttcagcataagcaaggtcttccatctcaggaaatttacgcatgaattgttcatagtaaggaataaccgtatcgactcttgtttgttgcagcataatttctgacacccatatatggtagggatcgttcgattcacgccaaggcaattcccgtttatgagcctgataccactcgattagctggcgcctaaaatcgctgtatgatatgttttcattgtatgtttctgtcactcttctcacctgatatccctttgacttgacctgaaaaccaaatgccttcatgatgaagatacgcttattttccactaacgtcgggtataactatagcataaattacttttaggtacagccgccaattacgaaattgtgcatgattggttgcaaaaggaggatgctctcttcgtatggatacatccacacatattgtaatgggtgctggactggctgggctggcgacacttgatgtccagattgcttcatcgccttacatgatgacagccgtcctagccaccacactggttgcctccaatgcgccagatttcgataccgttttaaaattaaaaaacaatgcaatttacatccgccatcatcgcggcatgacacattccattccagcactactgctttggcccttcattatctctggcggaatgatgctcttctttcaagatgcctattggccgacgattcttctatgggctgcaatttccgtatttttacacgtatttgttgatattttcaatgcgtatggcacacaggcactctggccattttcgaatcgctggatcgcacttggtgtcatgaatatttttgaccccgtcgtctttggcgcccatgttgtcggaattttattatgggcattgggctttcccccaggtccatcctttgtcgttatttatgtaggattggttttatactatgcatggcggattagtgaaaagagggacgttgtcaagcgtgcaaggcaacatcacccaaatgctacccatatctttgtatcgccgacaattcgctggaacaaatggcatcttgttattcggacacctgatatgctttatgtagcccaatcaaaaaataaaaaaatcactttctttgaacgttatgcttttgacccgattccaactgatcctgtcatgcaagcagcgtgctccgacaaaaatcttgctgctttcctgtctttttcgccaacataccgctgggaaatggaggcgacaacggacggtggctacgaagttcgtttcttcgatttgcgctatcgcagcaaaggccattacccattcgtagccattgtgcaactcgatgccgatttaaacattgtcacttcatacactgggtgggtttacagcgaagaagcactgcagagaaaactgaaaatcattacgtaattggctatcgcctttacacgaatgcaataaaactggttagcattgccaccgatagcacctcgccatcccggacatactagagttaagccgatatggcgagggggtttcaccgatgcgaaacaaagctaaaggtttcccaaacccgatttcgttcaacgggaataaagcgaataatgccgatgagcacgcgtctaagcgtcctgacggtacaacgcgcgaccgcccgcaagaacgaatgagatcgtccaaccactttaactcgctttaattttgggaggaatgcctcatgggaaaggaaaactcgcgtttctcacacagtttgtatactgatccgttcatgtcaccgcgtgccaatgcaaagcacgctttccaccaagtgaatggcgaaacccaacaaagccaacacaatattgtgcttgaagcgcaaatgcgcaaacgcacgtaaatgtgcgaaaaacgggtctcctttttcggagacccgtttttaattcgctaattttttatcgcctaacaatgagatcggcaccccgactaactcgcgctcaccggtgcggtagccccaagcgaagcgaccatttaaataggagacttcaaaaaaagactccccgtcagtcatatggtaaacttgtcctggctcaatctctgccggatccattaaatacgcttgcgcaagtatttttcggcgttcatagacggcgtattcattgctatttcctagctgctccgctttttttgctttttcgtttaacatcgcgatttccagctttaattcgtattcgtccatgtcgctaaatcgtttttccattacgtctcttccccctccatttcagtttgtaaaaaacggtcaatcttcgaaagcgcgaaccctttccggtaaagcgcctgttttaatttataagtcagttcccgtccattgtatttttttacatatgattttaagagcttctccccttggtacacaagagcttcccactcattgtcctcgtttgcttctcggtttgcaagtgctgcctgaatggcctcatattcaaaccccttagccaacaattggtgcgttcgtttctgctttaattgctcatttgattcgcgccgattgacagcacgcctttcctgtttatctaaccatgctgttaacacgtcgatttgccactttatttgatacggcgaaagcgccttcgccattgcttcggcatttacacctttttgcaagagctgttgccttattttattagggccgatcagcgtttgtgctgttttcgaacgggcaaacgcttcggcaaaggcgcggtcgtcgataagcttttccgcttttaaggagacaatcgttttttcaatatgctcgtccagacggtccttttcttttaaataatcgcgtatttccttttctgtgcgcatgcgatacgataaataatgaagggcaagatgatgcgttttttttagttcgtctgcttcaatgagcgccttgatctcattttcgtccagttccagcccttttctcaagccgtattttactaagatggcttcgtccacactaaacgcgaaccgttctgctcctggcttgccaataaaaacattgtagcgctgttttgcttttttttggacggtaattttggaaatcgtcgccacgtagggacgcctcccttctttgtagtcaataggtgtgaataacagcataagcgggtatcgtgtagaacgagtgacagccaaagcgaaaaaggggatatgctatgaaaatcgctatagccggtggtacagggtttattggttctaaactagccaaccgcctttatgatgaaggccatgatatttacattttaacgcggaacgccaaaaataagcaaaacaaaaaacgcctgacattcgtggagtggctaaatccagctgcctcgccactcgagcaactccagggcacagaagcatttgtcaaccttgctggcgagccgctaatgggcaggtggacaaaaagcaaaaaagctcagattgtcgctagcaggcttgaggctacgaacgaagtagtggcgttcatcagcaagatggagcaaaaaccgagcgtgcttattcaagcttctgctatcggctattacggccattcagactccattacatttacggaagcagacggaccggttaacaacaactttctaacagaagtagcgagaaaatgggaaaatgctgctgttcaagctgaagcctatggggtccgtaccgtattaacccggattggcattgttcttgataaacgggaaggcgcattagccaaaatgatcattccatacaaactttatgcaggcggcaaagtcggttctggcaggcaatggatgtcatggatccacattgatgatgccgtcggtttaatggcttttgcgatccaaacgaagtcaataaaaggcccgctcaatgtaacagcgccccatccagtgcgcatgcagcacctcaaccgctcagtcgctaacgttttaggaaagccttattggctaccagctcccgctttcgccattaaagttgccctcggagaaatgagtacattggtgctagatggcgcatatgcttacccgaaaaaggcagtcatgcatgactacccttttatgtataccaatattgatgctgcgctcaaacaagtgctaacgtaaaaaagcttaggtgtatgtgaacctaagcctttttaatggacgagcacttgttcaaaataaatgtttttttcatcaattccgatcttgcgcaaaaactcttcagcttctttcagcgtatcaagcgggtattgcgtttcgcaaagcagggtggctctccgcaggctttcctgaaattgcttattcaacgccaaatcccgctttacattatacatagcatttaatacgcgctcatcccgttcaaaactgacgaacccttccgtttcgttaaaatagacaatgagtggcacatgcgtatgtggatgaatgatgtgcgttttgtataagttcaagcgtgaagccccccttgttggtgcataggccaccgttcttctttatcgtatggaaaacaagcgcttgcggtcaactatgaacgcctagttttacgtttttttagccaaggctcttaagtgctaccggactcccggctccaaaatggcaaacgtcccattgtttgcattgatttccccacgcgccccataaggcagcaaacatttcggctcgttatggccgaaactagcattgtaaaggacaggcaactgcccacaattaaattcagctagcactttttttatgacatgcttatattctttataaaaccggccattttggggtttagcaaacagaatgccgcttaacctttctaaaattccacacaccccatattgacgcagaccgtcttcaagcagccactcaggcgcgtgtacttcagacgtttctaaaaacaaaattgctccatcaaattgcgaaggagcgggaaacaacggcgttccttttagaatttctaacacttcaaaacaaccaccgattaacggcccttgcacgactccctccccttgcaccacttcataatcatgattaggcttatatgtacgacgcttctctttgttggcaaccgtccattcaagccattctcctgtccattcgggagccactgggatagggccaactggagtgcccgagaacaacaccgtttcaatccatttagctgtgtaagggtgcatcctaccattctctgcaaagtcattgagcacagaaacgccataaaagctagaaagcccggctttcaagcaaataagatgagcaactgtgctatccgaatagccggtaaaaattttcgggtttgcgcgaatcagttcaaaatcgatgtaagggagcatgcgaatgctatcattgccgccaatgcaggaaataatggctttaatcgatggatcagcaaaagcggccatgaaatctgccgctcgcttttctggatggcgatatacttcgtcaggagggcttaacgtatggggcatttctaccacctcaagaccaaacacttcctcaatccgccgcttcccttgttcataacgccaacgaatctcctcgtctccagctgctccccaactaaggctcacagttgcgactttatcccctttttgcagtctagcaggctgtaaaagtttaagcacaccattcccctccctttttcgtgggcctcttttcatttttctattggaagcaaacaagattttaacgttttttatttgagaattagctcagtcacactttccacctgtgccgtccatgggaacatatcgacaggctgaatggattgaatcgcatagccgccagcttcgatcagatgttgtacgtctttggcaagagtagatggattgcatgagacgtaaacaattcgtttcggcttggcttttagcatgctttttaacaattggcggtcacagccgctgcgtggagggtctactaaaataacgtctggtttaaatccttgcttaagccacaacggcagccatttttctgccggacccacttcatatacagcagcgattccatgctttttggcattgctgcgtgcattttcaatggcttcttcggtaatatccatgccacggacttcttcggcttgatcgccaagccattggccaattgtaccgacaccgcaatacgcgtcaacgagcttttcttttcccgttaagtgggctgcctttttcgcttcattgtacaatttaaccgtttggctcgggtttaattggaaaaaggcccgtgccgataggtcaaagctgtattctccaagacgctcatggatcgtcttttcaccgtacaaatgaaccattttctcgccgaatataagcgacgttttctcatggttgacgttttgcataacggacgtcacttcaggcagtttttcccgcacttgtttaataagcagctcttttttcgggagtgcttcggttcttgtaataaacacaagttggatttgctttgtttcaaagccaattcgagtcacgatcgtccgaatgtcaccgctatgcgttttctcattataaataggaatttgcaaatctccgagcagctgcttaacaatttgtgccacccggttcagctgcttatgctgcaccatgcaagcggacaaatcaattaaatcatggctattttcccgatacagccctgctgccactctgccgtctttttgcttgcgcgtttgcagctggcttttattacgataataccaagggttgtccatgcctatcgtattttttagcggcagcgttgattctggcacatttgtgtagcggacaaacgcttggcgcacaatgtccttcttgccttccaatgtcgcctcataattcatatgttgaagctggcagccgccacactcttcatagatggggcacggcgctttaacacggtcatttgatcgcttgcggattttcttgattttcgcttctgaaaaagagcgccctgcctttgtcacttcagcgacaacttcttcccctggcaaggcgccttttacaaaaacaacatggcgtttataataaccaacgccttctccattaatgccgatacgtttgatcgtcaacggaaacttttgccctttgactacagacacgccttggcttgatcgagaagacgttttttgtttattgttcgttttcatcgtctcactcctgttagtggaggcggtcgcacttttgttgattggccaactcgcttcttcccttagtataacaaaatcgactgctttcctaaactttctaatccatcttgcctgcagttctgttagaatggagaaggaattttgcataaagaggggtgagagggttgtctatacctaccgatatcgcatcgctaaaaataatggcacatgtatacaaaaaaaaggacgtttactcgatattcgctaaaacagtggaaagcttagtcgacaccgttccatatattgattgggtcggtatttatatgtatgaaaatctcgaccataagcttgttgctgcctcctgctttgaaaatgatttgcgctgggaatgcaacggcgaattaaaatttcctgttaaaaatgcaaacagtacggaaatcggcgtcatggtcgtacgcacgaaagaagcgatcgccttcgatgtgacagatgtcgcaacgcttgaaacgattgcaagtgccattggccatgaatatagcctaaattaacgaagagactgtccctatagcctctaaataaaaagggaactgcccttagaaaaatacaatcggcagtttcctttacgggacatgcttgtgatcacccggcttataccctctttagtcagtcctccttttgtccgtcagtttcaattgccatgattgctgctatatcgatctagatactcgagcactagctctttcaaatgtagctacagcccaagcaaagactattttttcgttgaacgattgcgatcccgttaagtttactaatcgtagggattggtattaaaaatggatggattgagataacgaaatgagatatttacgctttttactgtacttccttattgcaacgacgatgttctattttgtaagtaagtatgttgccaatcaggaaagtggttcttttgaaatgatactaggaaatgtcatccgtggtctcattattgttgcaacgggttatttagttgcgataaagatgtttagaaatgaaaggaaccaagcctagctccaaagccaagggcttgattcctcgcttagatgcgttggtacaagcgtttcgcttacgcctcacaaagctatccattatctaaatcttttaaagaatcccgtatttgcacaggaataacagaaaaccgtgtaaatcgaatttacccttcggttcaccttgaaacgttgcgcaaaattgtacacattctgttgtgatttaatcaaacatgcatatttgtagctcctaagcaggcttgttgcattcaaaatcaatttggcgtatagttaattacggactcaatcgatctggaataacggcaaaattggaggcggctgtagcaatgaaatattcaaaggcaacgaactatgcactgcatacaatggcttttttgacgctaaatgaaaaaaacgaagcgattggcgttgaacagttggcgaagatgcaaaatctctcgcctacgtatctgtcaaaaattttaactaagctggttaaagccgggttaatcgaatcaacgcctggtgtaaaaggcggctaccgtcttttaaaacgccaaaaggaaacgtcttttcttgatgtgatccaagcaattgaaggtcaaacgagcttgtttcattgttcgctcgaccacaacgagctcccacacaatcatggttgtttgattgagcaagtcatgatgaacgccgaggcaaaaatgaaagcggatctcgatgccacttacattgccgacatcgccagacaaatgaaagaaaaaagggcctagcctccttttttgcactaattacagatataaagagtccttaatatatacaataaaggagcatagagccatgtttgattgcatcattataggaggaggcccagctgggctaaacgcagcacttgtattaggcagagcgaaacgaaaggtactgctattggatgaaaacaaaccacggaatgccgtcacccatgcatcacatggttttctaacaagagacgggatcgaaccgagcgcgtttaaagaggcagcatacgccgatttaagaaaatatccaaatatagagtggacacaagtacgcgtaggcgcaatgacaaaagaacaaagcggcttttctgtgcaaaccgaaaagaaggaaacgtatcacgcacggaaaatcttgcttgccacaggtttaaaagatcacttgccagatatagcaggaattgagtcgttttacggctcgagcttattcccgtgtccattttgtgatggctgggaattacgcgatcggccccttgtcgtcatttgtgaagatgagcgcgtcctccactcaggaaaactcatctggaactggagcaaagacttagtcatttgcacaaatggccagcgctttttaacagatgaacagaaaaagccgtttctagccaacggcattgagattatcgaagaagaaatcactgccctcgaaggcgaagacggccaactacaaaacattcgctttgccgatggccaagaaatcaacagaaaaggcggctttgtggcagtcgatttgcagcaagccgcagcctttgggaaagcacttggctgcacatacaacgagcaaggcggcatcaaaaccgatccgtttggcagaacaagcgtcgcaggcgtttacgctagcggcgatactacttttaacgggccacagcaactgattttagcggcagcagaaggcagcaaagttggggcaggcatcgttattgatttggtcgaagaagagttttaatcaataataaggctccctaatcacaagggagccttttattgatgatccatgccacaacctacgtaattacttcaaaagtgaaaagaccctttttctctctttaattgtacaaaaaagcctgtcgactgtctcggttttaccgagattttgccaacaggctgaactacttttgcaccaaacgttaattgagcggtacacactaaggcatgggagaatgtaacgacaattcgtctaaactgcggaacgtgtagccttggcgccggcattcatcaataatatcaggcaatgcttcggcgttatcaggcgatacggcgtggattaacataatcgctccagggtggattcgtttcattacttggtcgtaggcatactttccacccttttgtttatcgacttcccaatctttataggcaagggaccaaaatacattcgtatagccaagctcctttgatttcatgagcgtacgctcactaaattcccctcttggcggccgtaaatagcgcatctccgtctcacctgttatttcagtaaacaatgttttcacgtcatcgagttcagccgctagcttggcatcgcttgtttgtggcaaactcggatggtggtatgaatggttgccgacaatgtgcccttccgccaccatgcgcttcacaagctctggcgctgtttttaaataatggcctgttacaaaaaaagcgccagtaacctgtttttcttttaacacatcaaggactttttcggtatagccgttctcatacccgttgtcaaacgttaaatataaagacttgctgtcacgatcgccgataaagtagccatccgctttctctaacagctctttgtacattggttctgtatctgctggcgtgtgggctggagctggtttgtaactccaattgtacgttttgttttcgtacccgagcgccaatgaagtttgcccaatgataatcgaaagcgaaagcagtaaacaaattgcatttttcatacgtttctccctttcatgtgtttattcgtagcttccgtcagcagaaaggcttttattcgttcttttttgttgcatgttttaatgggctatggtttcattagcatgatgctgtttttgcgatcaactaggaggatgctaaatgtttaactggaaaaatgtttttcgaggtgccgcgatgggcatcaccgaacttgtgccaggcgtgagcgcgagcacgattgctatgctcttgggcatatatgaaaagttgctccaagcaattagcgacttgacgacaggccatataaagcgtgcttttcgctttttaatcccactcggcattggcatggtagctgctgttgctttattcgtgaaactcatagaatatttgcttcatgtacataatcaaccgatgatgtttttatttgctgggctcgttcttggcattttgccgtttttatggcgctctgcccatgcagaaacgaaacattcgtttaaacccctccattatgtgttgatgatcggggcgtttgtgcttattgcaatgaccaattttgtcggcgaatcaaaccaagcagtgatggaaaacctatctttgccagactatgtttacttatttttttcaggctggctggcaagcactgcccttgtgttgcccggtattagtggttcgctcgtttttttgattcttggcgtgtaccacacagcgattgcttccctctcgaccatgaatatccctgttattatcgcaattggctgtggcgttgtccttgggctgcttgtgacaagccggctcgtccgtttctttcttaaaacatatacgcaagcaacctattcgctcatgattggacttgttgccggttctcttattgttatcgttccaactgagctgcctgagacgttcctctattggcttgtctcacttatggcccttttgtttggccttgtcactgccttaacatttggaaaagcagagcgttaatgaacggaaaaatgattgtacaaaaagtacctatccccgatggacaaggtacttttttgaattgtgtatcaatttcttcaaaatgtttgacgttcgcaattaattgccctaaaatgaaagtagttcatgtgagagcggggtgattcgatggtggagagtacaaagtagatagaaaaacggtatcgtgcgtacatgccgtttggaacttctcgattgctttccaatcgggtcgggcttccgctattcttgcgaaaccatctaccacttaaaagtaattgtgtacgcagctagcctttcatagagaaaccgttagaattgcgcgttgccctctggttccaaactaggaaatgtgattcctaatttgaaggacatacaggaggtgactccctcttatacgaggggaatatttggacatacaacagggattaagcttacttgcggtcgccattcttattgcgttaaccgctttcttcgtagcatctgaatttgcgattgtaaaaatacgtagcacacagcttgaaccgcaccttgctactggcaaaaaatcggcgatttacgcgaaaaaagtgacatccaacttggatgaatacctttctgcctgccagcttggcattacaattactgccctagggatcggccgccttgcagagccgacttttgaacaaatgcttcaccccttctttgaagatgtggtgcccgcttcggcagtaacctcattatcgattgcggtttcatttctttttgcgacatttttgcatgttgtcattggggaattggctccgaagaccatcgctatccaaagagctgagcaggttactcttctttttgcgcggccgcttgtatggttttaccgtatgcttttcccattaatttggagtttgaatggctcagcccgccttttaataaaaatgttaggcttcaagccaatgtcagaacatgaagtgacgcatacagaagaagagctgcgcctcatcatttccgacagttacaaaggcggcgaaatcaatcaatccgagtttaaatatgtaagcaaaatttttgactttgacgaccggattgctaaagaaatcatggttccaaggacggaaatttctgcaatttcaattgaagactcgcttgaagacaacttagcaatcatgcgggaagaaaagtttacccgctatccagttgtaaacggcgataaggatcatattctcggaatcgtaaatgtacgggaagttttatcggacatcgtcgcccctgatgtgacagaagagataaagcttgaaaattatattcgtccagtcattagcgtaattgaatccattcctgttaatgacctgcttgtcgaaatgcaaaagaaacaaacgcatatggcgattttgtacgatgaatatgggggcaccgcagggcttattacagcggaagatatcatcgaagaaattgttggcgaaattcgcgatgaatttgatgtggaggaagatccactcataagcaaaattgacgaggatcattatttacttgacggcaaaacgctcatttcagaggtcaacaaacttttgcatgtcgagattagcgaagaagatgttgacacaattggcggctggctcttaacggagaaatacgacattgcagtcggcgaaacgctcacgttcgggccttatgtgtttgcggttaaagcttttgatgggcgtcagattaaacaaatcgaagtcttaaaaaatgacgaagaaaaccgtttcaaaaaggacgaagaagaacgtttcgatcccccgtatgaagcgtctggctcctaataaatctatcaatctaaatggcttgttgcgaggatgaaagcagccgtatatgaaatgacgagcaacgttttcgtgctttccaacactcttgcaaaaagcgaggcaaacgacacactttggtgcgtttgccttttttcttacagcaaaccgtgcttggctgttaaatcggcacgaacggtttcaaggtgcgctgtccggtttgtgtagtgaaggaggtagcgttcgtcttcttctttccactcaagcaaagtcacacttgtattgccgatgacaaatggacgttcaaacgcagcccattgttctccaactatagcatacataagcagacagctaataaagccaccatgcgaaacaagaatgaccgactcatcatcacggtgtgcctttttcaattgactgagcaatgaataacagcgctctgttagcgcttgggcagactctgtgccatcgattcctgaagcaatcaatggctttcctgttgtttcagggaagcgatccgcaatttcagaacgtgtcaacccttgcagcgggccaagatggacttcacgcaacaattcccattttcgcggagggagctgcgtttcttcagaaatggcttgtgccgtattagcagcccgtgttagatcgcttgtatacaaataatcagcagcaagtgttgtacaaaaacgtgccactgcttgcgcttgtttttccccaaggtccgatagcggaaagtccattgacccttggatttttcctagccgattcccttctgattccccgtgccgtatcatatataatttcattgtatcctccttgttaggggcagcttccattgcctctattcgcgcacttgcgacatcatttgccttgcaccgcaagtgtaccaaacatgacggccatcctcaattggtctttttcttttagcaaagatgcgctaagataggaatggacatttaaaggagattgatgaaatgaatgtgcaacagaccattgcccctcacacagacccgtgggaagcctatagggatatcgagcaatatggcgaactgaccctttcaaacattgaagttacaacgactacgctatgcaacatgcgctgtgagcattgcgcggtcggctatacattatcgccaaaagacccaaaccccctcccgcttgatttactcattcggcgcctagatgaaattccccgcctccgggcgtttagcattacaggcggcgaaccgatgatgaacatgaagtcagtgcgggaatatgttgtccctttgcttaaatacgcacacgaacgtggcgccaaaacgcaaatcaattcaaatttgacgatgcctcttgaacgctatgatctgatcttgccctatttggatgtcttgcatatttctcacaactacggcagtgtggatgatttttcgctcatcggctttgcccattcaaagcataaaccgaaagaagaacagcgccatgcgatgtttcagcgaatgattgaaaatgccaaagcgttaacggcaagaggcgtgatcgtttcagctgaaacgatgctaaataaacggacccttccccatttggagaacatccatcagcaaattgtcgaaatgggctgccaacgccatgaagtgcatccgatgtatccaagcgactttgccagcagtttagaagtagcgagcttggatgagattaaatcaggcatccaccgcctccttgattgccgcaatcaaaacgtttggatgctctttggcacactgccattttatccttgcagcaacaacgaagacgacttgcagcttcaaaaacgcctgtacagcgaaccgaatgtgaccgtccgcaatgaccccgatggccggtcgcgcttaaatgtaaacttatttagcggcgatatcattgtcactgattttggcgatgttcctaagcttgggaacattcaagacagccgttttgatgaagcttacgcccggtggcgcgattcagcgattaaccgttctctctcttgccattgtccttccgtgcaatgcttaggtccgaatttgcttgtcaaaaacacctattaccgtgaaaccgatttttcaaaacgatctgctcatttttaattggtggaaatgaagagcgaaaaccacactcagactaaaagaaacgctttagacgaggagtgcagtcgcaagaatagaacagaggtttatgagcctaggcaaacgccgacgtatgcgaaaagaacccatgcccttgttatgaaagaggcatgggttctttttattttggttgtgtagaagccataaacgtaaaagagatattgtcttgcacaggaatccaagcactaatgccttgctcggttacattcttgacatctaacctcggttttccgccttttatcgttaaatacacttccccatatgtgacatttcctttttcttggactgccggaacatagccgtataggtagccaacttggcgtgatggcacattgtatttttggttctttttcgtcccttggccaaccactgtatcaaaagcaaggggcaagcttgttttctcagcggcgctaatcatcatcatctttttgactgcctctccgttcggtatttttgcgctcaagccgcctgtcacttttttctgttgttcttgcaggtaagacatgctctttggtgcatttccgccacggttgtcaatgtaatttgtattgactttttgatactcccaattgacttccgttccttttgattggtaagctagaggccactctcctaagtaaatggaagctctcatcgcaaatcccaattgcggaaactggatcgacgactcattcattagccggattaaatctggattttgaatttgctcttccgttgaccggagcaattgtttggcaaactcgcttggctgcaaataaggcaagtcttgtgttgcatttttatatgtgttttctttagaaatggataagacagagtcaggaattttaaaagatgtttgttcaggctcatttgcttccgactttccgtacgcaggagccgtgattgccaacataaaagccaacaataaaagcgcaattcgtttcataagaagtaccctccttctatcgtttgtaaaggtattgtttgacatctcttttcgttttatccatcaaagccataaaaaaaacagcagcatatcgctgctgctgtttttacctaagcccgatctataagaaagaacgccaaccgttgctgccgtccttacttaaagaatcccctctcttatctttcgttattcatctcacgctgcttttttaacagcttaatttcgtcagcagcttcctttgctgcttggatcgcttcctcagatgtttctttcatatggcttgctgtttgtgtcagcgtgcgcacatcttcggaaatgtctttccaaatcgagcggacatcctccatgacttcttttgcttgcccaaccatgttttcccgattgtcccgcaaaaaggcatacgtgtcccctgcctgctgcttcagttccttcgcttcttggcaaagacggtttcgccaatctttttttacaagtacagccccgatgacaacacctgcaatcaaaatcccccattttttgctggccatttttattcctcctttatgtatcctgtttctattttaaaacagattctctcgcatttgtaaagctgaacccattcacaaaaaaatgccaaccgcaatgggtcagcattagttgtatgtttgcacaaggcaacggtctgtttcaaggatttcgaatttagtgtgatgattgctgttttttagctcatccacctgtgcagaaagtttttttatttgtttttcaagggcaatcaatttttctttttctgattgtgtcattgttggtccctccccacttttagcttgcccgaacaagcgctcaatcaccagtaaaaaagatccctttaagttagaaatattctaccagtgtttttcattgatgtaaagtgtcttccctaaaaggattttctgcttaactagacttggttcgacaaatttcatctttatcaaaaatttgtaacaaattacgcttgtaaaattacgttttcatggtatactaatgataggaaatattcagacacaaaaagggtgatcatatgcgtaaacgtcatttaatccgttttgaggacttaatggcccaaaatagagatgaacttttaaacgatcctgaggctttatccaaaattgatgataaattggatgaacgtgcccaaaagaaaaaccgttcactcaaaaaagccaaaccaactagaacgagccgtttttaaggctcgtttgaggttatcgacagagtcgacaaaatccccaggctgatagaaaacgcttgtcagccgaggcgcgaaaccgagtgaagatgcgaatagaacatgggttcatgagcatatgaatgaggtgagcaacgaaggatgcgagcgtttttctacagtctggaacgagcctttttttaggctcgtttttttattcccgcaccttttccctttttgtatatttttttggcaatcgcacaaagtaatttcatataaaaaaacgggaagcgggggtccctcatggatcatgtgctgcttgcacgcatgctgtttggcacgtcaatggcctttcatattatttttgcgacattaacagtcggcctatcgctaatgattttttttgcagaatggatgagggcgctacgcaacgatctcgattatgccgtcctcgccaagcggttaacaaaagggcttgccatccttcttggcgtagcgattccaactggtacgattgtagcgattatgctttctctgctctggccaggctttatggaaatcgtcggtcaagtaattgcgctgccatttcaaattgaaatttttgctttctttttagagtcgttgtttttggctatttatgtatatgctgctgatcgtctttctcctgctatgagaatcatcagttccttttttattgcctttggcgctgtggcctctgctgttttgatcactagcgcccactcttggatgaataccccgagaggttttgacatcattgacggccaaattgaaaacgtcaatccgcttgcggctgccttgtcgccaagtttttggtcgacctcgtaccacgtcgttagcacggcctacatgacaggcgctttcgtgttatgtgctgttgctgcttttaagttgttaaaaccatccattacagcggcagaagtccgctaccaccaaaaaggattaatgttggcgcttgtgtttggatttttgatgtctgtttggactggctttaccggccatgacacaacggtcatgctttatgaggaaatcccaatcaaattagcagcagcagaagggctttttgacacacaaaccaatgcaccattgacgattttaggaacgccaagcccagaagcgaatgaagtgattggcggactggaattccctggactgctaagctggctcgcgactggatcaacggacggggtcgtccaagggttaaatgattttcctgttgaacagtggcctccactttttgttcatacactatttaacgtaatggtcggcatcggttttgcattgattgctgtttcaggccttggcctgctgttttcgtttttcagacgcaaacagaacggcatccggtttccaaaatggctcttaatcgcacttgttgctgctggcccccttgcgatgatcggcatcgagacaggttggatttttagttgtactggccgccagccttggattattttcggcgtgcaaacgactgccgaggcagcgacaacttccggcaacctcggcttgttattctttttgttctcaacgctttaccttgttctgctcattttaacgagttttgttatgtatttttatttcaagcgaaatccgctccgccaagatatgagcgcgttccgttaggtattaggagggatttatggaatctgtctatgttgcggtactgctattatgggcattgctgttcatttatgctgttgcgggttcgattgattttggcacaggtttttgggccatgtattatagccgccagaaccattataaagcagcaacgattgcaaacaactttttatcgcctgcatggaaagtcacaaacgttttccttgtccttctcgttgttgcatttgtggctctctttccaggggcagcccctacgctcggcacattgatgatcgtacccttttgccttgtcctgctgttgcttacaatccgtagcgcctttttggtctacgcgtacagtacgaaaaaatattcgcgcatgctgacgctcgtctctgggctatgcggtctgttcattccagccattcttgtcagcattttacctgcagcaattggcggatttgttgtcgtcgctggcgacaagcaatacatcctagtaaacgagctatttttaagccctgccttttatacacatgttggctttggcctcgtcactcagttgtttatttcagcattgtttatgtgcgactatgccaaagaggcgggagacgaaagcactgcctcttcttaccgaaaaaacgcgattttccttggtcctgtcacccttgtttttgcagtagctgccatctttacgcttattcccgaagcgccgtggatgtttgagaaatttttgtcgctttggcattggtatactttatccctgtttgcttttgcgttagggtatagcgccttatggtggcggtcaaagacaagccatctcggccaccctcgtgccgctttattgctcattgttgtccagtttggtttagcgagcattgcttatggtagcgcccatctcccgtacttgctttacccgaacgtcacgatctatgatgcctttacaaatgaaaccatgttccgctatttgctcattggcttcctaatcgggctcgccatactcgtccctgtctttctttatttttggcggcttttctttaaagataaagcgtacttgcagagcgatcagcacgactattcatagacgccactgcttattcgagtgattgtacatcacataactaacagtggcgttaattatcgtgcgattaccgctcgtctcggactggaaccccctcaacaggaaagtcaaatagctctggatcgaagtcaatgtcttcttcaaacgtggttaagatcaaaacttggcctggcttgccttgataaaatgcattttcccttactagcaaccctgtttcagtatcgaaccacaaattgatttctacatcccgttcttctgccgtcgcttgcacatggtgtgcgaggtagccgctgatttcataaatgccttgatatgtaagggcatagggagattgctcagttattaggtcttcaagtggctctggggaaaatggcggaacatggtcatcgctagcctcgctcagtacagcaaagctatctgtgctcaggtacacgtttcttccttcaggcgtttgagtttcgattgtttccacgccattcccatcttcatcaatgttttcagattgtttaaaaaagtaatccgggccattgtcagaacggtatacatgcaaccgctcaaaagcatacgcttccatgacagtcccgtcttccgctacttcgtgtttttgccactctaggctaaaattccccaattttttctcagcaacaatcgcttcctcgataacggattcagctgttattgctgcaaccgtttccgcctccccttcttcttcagctagttgattgtgctcctttttatcgctttctaatgccgtttcctgatcttcatttgtgtcattatccgtatttggttttgatgtttctgtatctcctgcacaggcagagagaatggcaagtaccgataacaccgccatccacttcattttcattcaaaaaggcctccttctttgaagctcctaagcatcgatgaccatgttctattgttattttacttcaaacctaagttccccttctactattaattcttgcgcaaaaaaacagcggaggctaacccccgctgtttttactggacaaattgatggctgtcttttagcacaacatcgatcgcttcttgccagaagtccggttttgtcaaatcgacttgtaaatgcttttgtgctagttgttcggctgtcatgctgccactgtcttgcagcaacgcaatgtagttgtcttcaaaagaagcgcctgcttttaaggcccgtgcatataggcccatactaaacaaatagccaaatgtataagggaaattataaaacggttgtttcgttatgtgaaaatgcaattttgatgcccaaaaataaggatcgtatgcttctactttattgccatatgcttctttttgcgcctcaaccatcaattcatttaaacgttcagtcggtacaatcccctgtttgcgttcttcataaaaacgcgtttcaaacagaaaacgggaatggatattcatgaaaaaggctaatgaacgagagagtttgttttccagcaaatatcgttttacatctggactttctgcctcagacacaagtgcatcagcgacaatcatttcggcgaatgtggaggcggtttcggcgatgctcattggatactgtttttgcgacgtgacaggcatgtcttttaagcaccagctatggtacgcatggcccagttcgtgagcgagcgttgcaacattgtccattgagccgtcataggtcataaaaatgcgcgattcttgacggagtggaaaagttgtacaaaagccgcctgggcgttttccggcgcggttttcagcttcgacccaaccgttgctaagcgccatttcagcaaattcagccattttcgggctgaagcggttaaaatgcttgatgatcagctcacaagcttcttcgtacggaatatcgtttttagacgtttcgcttgtcggcaaaggagcgttgacatcaaacaagctaagtttttccaaacctaacaattctgcctttttgtccatgtatgggtatagttttgacttgtttttcgtaatcgtatcccacatcgttgttaatgtttcttcggaaattaaatttatgtccaatggttctttcaaaacattgtcccagccccgctcttcatacagcttcaaacggaaaccggcaaggcgatttaatgtttgtgtaatcaatggcgcttgctgagcccatgcttgtagcgacgcttcataagcacgtttgcgcacagaacggtcttcattcgataaacggttatggagttgtccagccgacaaatgtttcacttccccattttcttcaaacgggatttccattcgcccgactgcttcattataaacggatccccaggcgtgatagccgtctttagccaacttggttgccaattcttccttgtctgcgctcattttgtcagctgcccgttttctcgctttttccaacataaaagctgacggtttcattgcttcttcttcaaggagagaggcaaaggcttgatcgtcaatcggtttcagtttttcttcaaggagcaagtttaatttttgccatttgacttcaagctcttgtacttgctcttgacgcaaacgcgccgtttcgtcctttacattttgtgctagcaaacaagaaacaaaggcactcgcatgggcaagtcgaggaaaagtttgttcaattgccgtaacaagctcttgtatgtccacagaagcagcttctgtttcctgccaacggtcgagcaaaccgtttgtttcttttaagaagtcgctaaacgcctctgactggcttcctcctgcaaaaatcgattctaaatcccatgttattggatattgcatatacagcctcctgtcgtcaaattatttcgtctaccgtaacaatttaaatactaccactattggctgctttttgcacgttagatggcaaagaaaaagctgctgaccatggcgaatagcgttgccaccccgagcaacaataaactcttttcctgatttgaatagctcgtccaacgtctcacacgtaccaactcctttcgttattgctactttatgagacgaaaggcatggctatgcgaataattataaaaaaaccagcggactaaacagtcacgctggttgttcgagttaggagttgttctctgatccatgtttcacatattcagagatgtccattccaatggcatccgcaaggcgttgtccgtagtcttcgtcagcacggtaaaagttgcaaatggctcggagcgctgtttctggagcaacttgttttaaatcatttgcaatgtttttaataagcgcatcttggacattttttggatagtttcgataaattttgcctgcttggccaaagttgtttttcttttcaatcgcaattcgtcctatagtgccattaataggcgcacggtagtcttcatagccttccgcttcttttggcgtatcttgataacggttcggttcataattgatccggtttgtttgttggccgattggcattgccccatctctagtattgtttgccttttgcgcaaatgggcagttaattgggagatccaagtagtttgcaccgactcggtatcgttgtgtatccgaatacgagaagatgcgcccttgaagcattttgtcttccgatggctcaaagccagggacaagatttccagggttaaagccaacttgttccgtttcggcaaagacattctcagggttgcggttcagcgtcatcgtccctactaattgagaaggaatgtcttcctcaagccaatctttcgttgcatcaagcggatgaaaatcgaaattgtctagatcggctggatcaaggatttgtacatataaatcccactctggataatcgccacgttcaatcgcttcgtataagtctctcgttgcatggttaaagtcatgagcttgtatattggcggcttcttccattgacaagttacggatgcccattttcggaacccagttcagcttgacataaaccatatttccgtgttcattgacccacttgaacgcatggacgcttgaaccccgcatttcccggtaagaagcaggaatgccttcgtccgtaaatagatgggtaagcatgtttgttgattctggcgttaagctcataaaatcccaataccggtcagggctttggatattcgtacgtggatctggctttaaagaatggatcacatccggaaatttaatcgcgtcacgaatgaagaaaacaggcaagttgttgccgacaaaatcatagtttccttcttctgtataaaacttaacagaaaatccccgtggatcgcgaagcgtctctggagaggtaccaccgtgtatgactgttgagaagcggacgaaaacaggcgtttctttcccatcttcagaaagaaagtttgcttttgtataacgcttcatattgttttttactttaaatacgccatgggcaccagccccccgcgcatggacaacccgttcgggaatccgttcacggtcaaaatgggcgagtttttccaccaaatggtagtcttctaacaaagttggaccatgttggccagctgtacgcgagttttgattgtcgtaaattggatgtccttgattatctgttaatcgtcgcatatgtaatcccccttttgatcattaagctttaccaatatgtcatcgttggcaaatgaacgatacaactaaacttattccttaattggaatcattatcgttaaatatagtgtacgtggattgaggttgaaagtcaatgttatttataataatttttaagaacgaatctatacaaattgcaaacgtacgttgtttccattctttgctcccgtgcttacgaagcagtcgctacgagctagtacaagagccgtcctttcacaattagcgcttcttacttgagaaaccattttattctgtttggacaaataatatgatgggttttaaaactatttatgagaaggataagagtgaggcgcatgcacaaatgattgctaagtcttaaaacggagataaggttgtcatcacaataaaaaacggaagctgccccggtcagcttccgtcctcttcattgccgaattgttgaaaaacagatcctgggcttacttggaatacctcattgccacatagttcatttacaatccgtgcgttccgttcaaccgataaagcgagattggtggcacttgtccctaacgcatgttcgacattcattaaggaaaacatccggtttttgcgcgcatctttaaaaaggagttctgcattacgtgttagtttaaactcgctttcgccttccatttccagctcagtctgcattgcttccaaccagcgggggacattcggcttatagcctgttgctaaaatgactttttctgtctggtaggcaaacgtctgcctttgttgtgtttgttctccgatcacttgatagctccgcggtccctttttctcaatcgttgtcacttccatattggcgcgtattaaagcaggagaagcttttttggcaatgctgcggtggtacaataggtcataaatgttgtggagtgttttagcttgcacgccattgcgcaaatgcccgagcagtgaaagggtgtccttccttgtttcatagggaagttcatgaaaataagaaacaaaatctggcgaaaaaagctcttgcccaatctttgattcttctagttggaaaaagcctggcgatcttgtaaaccagttaagggtgtaatggtgattcggttggttctgtaaaagggagtaaaaaatttcagcagcgctctgccctgaaccgattaccgttaccgaccgtgcttcctttatgtctttttcataaaagcgatagtcgcttgaatggatgatgtcttcgttgcatgctttttctaagctgcctggaaggagcggcacactaccagtaccaacaacgatatgggttgcataaaccgttttttctattccagccgctaatagcacgactcgatatgcttctttctccgcttcatactgaacctccaacacctttgtgccaaaatggcagttgcttagttgccctgccacccattgacaataggcattgtactccattcttggaatgtcaaagcggttgaaaaaataaaaggacatcagccttttttccgcatgagcataatttaaaaaggtgtagcggctctgcggattagccaacgttattaaatccgctaaaaaaggaacctgaaggtcggttccatcaagcagcatgccaggatgccacaaaaagacatcattttcatcaaaaaaggctgctttgatatcggtgctttctgctatcatggctgccagccctaaattataaggaccaatccctacaccaacaacgtcaaacatatcctccatttcgatccactcctatttgcatatattacgaataaatgtatttgcgattttcccttgtttgtaacgaaatggcacatcaaatgttgtcgattgctttaacaagctcttttgatgggaaaaagtgcgaaagctttcatagccatggtaagcaccaatgccactcgctcctttgccgccgaaaggaaggtacgggtttgctgcatgcataagtgtgtcgttaatgcagccaccgccaaacgaaagctgctccgtaaatagccgttgtacacgctcgttttcagaaaatacatagagtgcaagtggattcggcaatgagcggactttttgaattgcttcggcaggcgttttgtatcggaacacaggcaagatgggcccaaagatttcctcctgcatgatcggcgcatcccaaggaacattggttaagattgttggagagattaaacgcgcctgtggtgaaatttgaccgccaagggcaatatgaccattatctaaatagcggcgcaggcgctcaaagtgtttgtcgttcacaatttgcgtataggttccttcttttgtcttgtccgaaaaaagcgtatatgtttgcgtttttagctgctcgagaaacggttcgtacacgtcttcatcgacaagagcataatcgggagcgatgcatgtttgcccagcatttaaaaattttccccaagcaatccgtttggccgccaatttcaattttgcttcgccatccacaatcactgggcttttcccacctaattcaagcgtacatggcgtcatatgtttagctgctttttctaacacgatttttccgacagcggcacttccagtaaagaaaatagagtcaaatggaagattgagtagcgtctctgctgttttcgcgtctccttctaccacggtcacgagctctttcggaaatgtggcccggacagcggcagccattatgcttgaagtccgcggcgtcaactcagaaggcttgagcactgcggcattgccagcagcaagggcaccaattaaaggtgcaaatgtgagttgaatcggataattccaaggggaaatgattaagacgctaccgtatggttctgttgccacccagctttttgaaccggtatggctggtaggcgttttcactttcattggcttgacccattcatcgattgactccaacgccaaatcgatctcttggtgtagaaaagccatttcaaccatcctagcttcaggctcttgtttattcaaatccgctcgtaacgccgaaagcagctctttttcatacgtttgcagcatcgtttttaacttttggagctgttgttttcggtaagcaacggcttttgtagcgccagtaaacacatgctctttctgaacggctagcaatgtctcgtacataacagctcaagcactccttttcaaaacaaaccgattttttatatctatacccttaaattcccctttttaacgacgatcactttcggccataatcggcttttatttctccccacacatccgtttcccattttaacactggattatggttagggttttcgcgcagccatttctccgcccgttccacaagcgaccaaatttcttccgtttcttttgtccggcttaatgtagaattggcttttttcttttttacccaaccaattgcagtcgcagaatcagagtagacaggcttgtccgttccttgtacataggcgaggccatggacaatcgctaaaaactcgcccatattattcgtgcccatgttaatgggcgtcttttcaaataaaatctcccctgtcttggtgtcaacccctttgtattcaacttttccaggattcccttggctaccaacatcaacgctaacgctgtcccaaacaggtgatttttgcgctttgtcttttggcctcactgaagaggccatgcttttgccttggaaagcagcctctgcttctgcaagcgtagggaatgatttaaaccttgcctgagggtaccctttcacttgggcttcacagtcagcccatgaccggaaaatcccttgttttcttcctttccaaacaacgtaatatttttgctttgccattttttaacctccttggatcgtatagtttcggactgccatggaaaacgtatggatggaggtgaggcaacttgaaacgaaataaacaagcaaaaaaaaccttgaccaataaccagacaccaactgaatccatgtttaatgaagaagttgcaagtgaacttattgacaacggaacaaacaaatcaacgagcaaaaaaccgaaacaacggtaatgttaaagctagttagcatacccgtaaggccaaaagcggcctaattaggaacgtttgtctctcacctgcatttagcatacttgattttccgtttcaacgaaagcgcgctaccacgacgacgatgtataaatttggatcaacctggcgatgattttggataaagaggtgagcgaaacttggacatccatattgaacggaaacggaccgctgacaaagcaggtgacttcatttgtacatcttcggacaagttatttgtgcttatcgttgacccaccagaacgctacccgtatttattgctatgcctcgatacgttctcaattgtacaaaattatagcagcattccatcgagagaagaattggaagaagatatcggggaagacattaaagaaatttacaaccaagaacacgccaccatttcgtttttataataagaaaaagggcataggcagcaacctatgtcctttcagtctgtaaacaatactcgaatagtttgtcgtttgcatgtattccaacaaagaataccattgcctacgagcctatgtgctaatcgctctcactcgtttcaccgtctgacaaacggcttctacctgtctaagctgtccgtttaagcgttcccgacaaaacggctctctttttgctttaactcgtccaataactgtttggccgcttcctggctcagcacaacatttccgtttgcaagctccaaatgttcttctgaagattcacctgttaccatgcatgttttgatggaaggctcgtacttcctgacaatcacacggtcatcttctacatagatttccaatgggctgccaatatcaattcccatggttttccgcaattcttttggcacgacaattcgccctagctggtccactttacggacaatgcccgtcgctttcattcagcatcctccttatattcaaacgattcacattcctattaaaccatgtcagggcgcttcgttccataaccgctccactaatttactcgaatcggtgctttttgctgtattttatggaatttaacggaaataaactaagcggtaagcattacgaaaaacccctggccataaggccaggggcgattggtttaaggcatggaatctgccgtcttttcttcataccagttatccaatactttcgcatcaagcacttgtgcttccacatacctggattgcttttttgaaaacagcttatgccagttaaagtcgaagtcttttgcgacttgaacaagagtaaggagctcttgccaagcgacgtagcgcttataccaaaaaaattggggctgttcggtcatatatgggtacaggtcatcgaattcagtgtgtttgcaatcaatcgtacgttcaaattgcacttttgcatcgctcaactttttctcaagataaacatgcaattcgtccttattcacaatgatgccccctcttgctttttgctattataacatatttcaagaaaataggagagcaaatagattaaatccaaaaaattggtcaatcaagacaacggcaattgctacaggaacgataccggtcataatcgtataccataatgtaaaagcttttttgccaaggacgctgcccatttggaattctgctgcgagtgtttgtcgttttactttaacaagcaaaaagatgcatatgagcaacgaaccaatcggcatcaatatgttggatgcaagaaaatccaccaagtcgaaaaagggcataccaaataggtgcacatccccgatcacgccaaatgacaatgcagaaggaatgcccatcagcaacacaaacaaagcgattagccagcttccttttgcccgtttgtctccatcccctctcataaaggcagcgacgacaatttctaacagtgaaaaagcggtgctaagagcagcgaagaagaaaagcatgaaaaagaggacaaccacgatatcgccaaatggcatttgcgaaaaaatcgctggcacggctgcaaaaataagcgtcggcccttcgcttggttctagaccgaaagtgaacacaccggggaatataacgattcctgccagcattgcgacaaaaatattcattacccctaatgtagcagcagatacaggcaaatcttgcttttttgacgcatatgaactgaaagtcaccatcaccgaaacgccaatcgataaagcaaaaaaggattggccaagggcgaacaaaactacttcgcttgaaaggctttcccaatttggcttgaacagaaaggccagtccttccttagctccatcaagtgtgagtgaataaatcgacaatagcactaaaaggacaaacaaagcgggaatcatccatttgcttgctcgttcaatccctttctggacccctttttgcacaacggcagccgtcaatcctaaaaacaacgcctgtgccccgacagccaaataaggatttgcgatcaatcccgtaaatttagcttggtacccgcctacatcaaggccgcctagctggccaaataaggaggaacctaaataaatcagcgaccagcccccgacgacgctgtaaaaagacaggatcaaaaaacaagtgacgacgccaagccagcctgtcacactccagaccgaacggggcgccagcatgttataggttgaaatcgcgtctcggcctgaatggcgaccaagcacgtattcaccgataagtaaaggaacacctatcagcaaagtaaatgcgaggaaaagcacaaaaaaagcgcctccaccgcttgtgcctgcaatgtaaggaaacttccatatagcgccgaggccaattgcgctgccagccgttgcatataaaaaacctaattttgaagaccattgttgtgaagttgccatgttgttgctcctttattacacacgatttttttatcgtaccaaaggaagctttaagaaacaagcctgccctgttctgaaaacttaccgacttttggctaacaaagtatccagaaaaatggttcattttttgttgcttttatgtttattacgcttttaaacgggtatagaaactatacaggaaaacaatgaaaaacccccttcgttgttttctaaaagcaaacaacccttcccccactactgaagcgccctttcccaggcgcttcaacctgtatacaaacgctcgcatatttgtcgtttgtctcactcactcatctactcatgaaccctcgttctattggcacctttcctcggctatcagcctgaggacgctcatgttttattggcaacttactccaattacactacggctgaacaagcgctttctaagttcatagtcttaggtttaacatcaacattcattcttgttcaggcgcctctttacatttgtgtaacaaaataggtgattcgtctcatctttcgacatcaatccacaacaattttccaaccttttcccctttctcgcaaaccgtgtccttgataaactaaacgttagcataggaaatctggaagaaacgtggtggaaattatgtggtcatcttcacaaattggcattgatttaggaactgccaatattcttgtttactcaaaagaaaaaggaatcattttaaatgaaccatctgttgtcgctttaaatacggaaacacgtgatgttctcgctattgggatagaagcaaaaaacatggtcggcaaaacgccagcccaaatcgttgctatgcgccctctccgtgacggcgtgattgccgattttgacgtaacagctagccttttaaaagaaataatgcgcaaggcgagcaaaaacatgggcatggctgtccgcaagccaaccgttgttgtgtgcgcgccgacaggctcaacgtctgttgaacgaagagccatccttgacgcagtgcgcagctgtggcgctaaacaagtccatattattgaagaacctgtagctgcggcgatcggtgcagacttgcctgtagaagagccaacagccaatgtggtagtcgacatcggcggcggtacaacggaagtcgccatcatttcgtacggcggcgtagtctcttcgaattctgtccgggtcggcggagataaatttgatgacgcgattatttcatacgtgcgcaagcaatacaatgtcctcattggcgaacggacagccgagcaaattaaaatcgacattggctatgcgccaattgaccatgaaacgcggacaatggaagtgcggggccgggatcttgtcaatggtttgccgaaaacgattgaattaaactcaaaagaagtccaaggtgctttaagcgagctgttatggcaattgcttgaagcattgcggagcacattggaagattgcccgccagaactgtcaggcgatattgtcgaccgaggcgttctgttgacaggcggtggcgccatgttaaatggcttgcaagattggattgccaaccaaattgttgtgcctgtccacgttgcaccaaacccacttgaatctgtcgctatcggtacagggcgttcccttgcttttattgataaactacaaaaagcgactttgtaaaagcacgatttagccacgctcaggctttctaaggcctgggtttttttattatttgctcctagtgaaaaagcctgttttgaccgttatgtcaaaacaggcttttcgttacttgttttcaattggctttttaatgattccatatatgattccagtcacaatcgcgccaattgcgatagccaacgcatacaggccgatgtaagaccatgtgctctcattgactaggaacattgtaaaaatgcctccatgtggcgcagggagctgtatatggaacaatccggttaaaccgccagccacagcggcgccgacaacgcttgccgaaataacacggattgggtctgccgccgcaaacggaatcgccccttctgtaatgaaagaagcgccaaggacatagtttgtccgccctgactctcgttgctgcttcgtaaatttatgcttccaaaacgttgtggcgatggcaatccctagtggcggcaccattcctgcagccatgactgctgcctggggcccaaggttgccagcatcaatcatcgcaatcccaaacgtataggctgctttattaataggaccgcccatgtcaatcgccatcatgattccaagaaccgtgcctagaatgaccatgttccctgtgccgaggtcgcctagccaattttgcattcctgtgttcacccaagcaaggggcgcaattaagtagtacataattgtgcctgtaaacaaaatatttaacacaggcgtaaataagatcgtttttaacccttcaagcgattgaggaatgccagacagcaatttgcgtacaaacaaggctaagtagcctgctaaaaatccagcgagcaagccgcctaaaaatccagaatcgccatttacggccataaacccgccaattaaaccaggggcaaatcctggccggtcggctatgctcattgcaataaacgcagcaagaacggggataaagagtgcaaatgcattatcgccaccaatcgccattaacaattcgcggatcgggttatctgcgccaaaagctgtctcaaatacaaagcttaaggcaatcaaaattccgccgccaatgacaaatggaagcatattggaaacgccattcattaaatgcttgtaaatagcagcgccgcctgattttttctcttcgctttgctcgttttcgcctttgccgccactgccttggtaaacaggttcttttcctgaaagggaacgatcaattaactctgctggcttacggacgccatctgccactggagcaatgaccacgcgtttgccgctaaaacggtccatttctacttttgtatcagcagcaacaatgatgccgtcagcttcgtcaatttccgctgctgttaaacggtttttcacgcctccagacccgtttgtctctacctttactttatagccgcggtcagtcgcttctttcttgatcgcatcggcagccataaacgtatgggcaatcccagttggacagccagtcacagcgagaatgaatttgccagaatcttcggaagcgctttcggtttgttcctctggctccgcttctttgtcttccattgcttgcttttcatcaatcaatgccagaatgtcatccaatgaagctgcgttgagcaagccttttcgaaaatcgtcgtccattaaataagttgacagctttgctaacgttgctaaatgttcattgtttgccccttcagaggcagcaatcatgaaaaatagatggcttggctgtccgtccaatgcgtcgtaatcaatccctgctttcgagcggccaaacgcaatcgctggcgttttgacagctgccgttttagcatgtggaatcgcaatgccgtcgccaaggccggtcgtgctttgcgcttcccttgccaaaatcgcttttttgtacgcttctgcatcgtttaatcgccctgcttccccaagcttggcgattaattcatcaataaccgcttctttcgtcgttgacgccaagtcgagaatcattgtttctttcttgagcaaatcagaaattttcattcctttgtttacccctctctataaatagtgaccgctacctcgtccatgagtgcttcgatcgtcgtccgttcagcaaagcctgttgaaaaggctgtagcgcttcctgaagcaacagcaaaacggaaagcttcgggaagggacatcccttccgccgtggcgccgataaaccctgctacaacggaatcccctgcaccgacggagtttttgacagtacctcttggcgtcgttgccaacaaaatcgattgctctgtagcaagcaacgcaccgtccccagcaaatgtaacaaagacatggccgattcctttcgccacaagcgccttagcatggggaacagccgcttcgagagaatcgatcgcttcgcctgcaaactcagccaattcatgttggttaggcttaatgaagtctggctgtgcagcaacggcttcttctagcggttttccgcttgtatctataaagacagaaacaccgcggtctttaagcaacttgctccatttcgcatatacatttgtctcaaggcttggagggacgctgcctgcgaaaacggccacatcgtttgctttcagttgtgtcaactgctcttcaagtgctgctacatcatttgctgcaatcgccggagaaacgccattgacttctgtttccacatccgcttttagcttaatgttgatacgagtgtcgccgcttatttcaataaaagacgtgtggacaccgtctgcctctacattggctttaatgtattcgcctgtaaaaccgccaatgaagccaagcgcggtgctcggatggccgatccgctttagcacacgggagacattaatgcctttgccgccgggtgctttgtagtcatgggctgcccggtttacacctcccttatttattgaatcgagcgcgacaaagtaatccattgccggatttaacgtcactgtgtaaatcattgttctaccaccttgattgtcgtcttagctgcaagttgtgaaaacagctctggttgttcttcacgtgtataagagcttgtgatgatggcggcacgctccacatcggcaatttttgaaaacgaaacgtcgccaaattttgtatggtctgctaacacatatgtttgccgccctcgttttagcgcttgtacttttatataggcttcttcaagatcaggagttgtatacccatcactaggggtaatgccatttgtgccaagaaacacaaagtcaaagcgaaaggcatcaatcgcctccaacgcgtttcggccaacaaaagcgtgtgtgcctttttttgcatacccgccaagcacatgtgtgtcaatttcggcttcaagcaaatgggcaatatttgttaatccatttgtcacaactacaatctgtttgcctttcaaaaaggggatcatttcataagtagttgttcctgcatctaaaaacaggcaatctccatcttgtacgagttcagcagcctgcttggcaatttttattttttcctgacggtttttgagcgttttttgcgcgattgttggctcatctcgcatttttttaaataccgtagcaccgccatgaatgcgctttaatttatttctctgctcaagctccgtcaagtctcgtcgtatcgtagactcagaagcaccagtttctacaattaattcttgaattttcaccacttcgttctttgcgagaagggcgaggattttttcttgcctttccaatgtcagcatttcgcacacctcagctctctttgcttagtatacaaccaaaaacattcaaattcaatcattttcacccaaaagtaagctttttgttgcaccgggcaaacggcaagcaaaaaacacagcaatcctgacaagatcctgtgtttttgctcgttcgtatgatctatttcgactgtaatgcttctattttttcggccagttctgcccagcgattaagagcggcctccaactcactgtccagcatttctttttcttttagcaaatcagcaattcgcccataatcactgcctgcgtcggcaatcgcctgctcaaggatctgctgtctttcttcaagcgctgctatatggccatcaatttgctcccattcgcgttgctcattatatgataactttttttgttcttttttcggctgtggcgttggcacttgttcgtgctgtggctgtttatcagtgatgtcgtttctgcccgtcatataatcactgtaatcgccgtcatagcgcaacaagcgattgccttcgaaaatcagcattcggtcaacaacacggtcaaggaaatagcgatcatggctaaccacaacaaccgcgccagggaatgtgtctaaatagtcttctagtacagcaagtgtttcgacatctaggtcatttgttggttcgtcgaggaacaacacattcggttcgcccattagcacgcgcagcaaatacaaacgtcttttttcaccgcctgacaaacggcgaatataggtccattgttgcgaccgtggaaacagaaaacgttcaagcatttgctcggcataaatagcatccccttttgtggtgtaaaccacttcagcaacttccttaatgtattcaaccacgcgcaaatcgccgtcaagctctgcatcttcttggcggtaatagccgatccgcactgtttcgcccacatcaaccgtcccgctgtcgggaacagtcctccctgccatcatattcagcaacgttgtttttccgctgccattttcgccaataatgccaagccgttcatttttccccattaagaaagacaagtcggaaaaaagcatctttccttggtacgatttgctaacttggcgaagctcaatcacttgtttgccaagacgtttatggccaattggcatatccagctgcctattggcatttgggccagtttgggcattcagtgcttctacccgttgaatccgtgccttttgcttcgtcgttctcgccttcgctcctcgctttagccaggcaagctcccgcctaagcaaatttttgcgcttatcctccgcttgctctgcttgcgctttgcgttccgctttttcttctaaataggtctcaaagttgccaacataccggtatagcgctccctctgataactcaaaaatggtattggcgacgcggtttaaaaagtagcggtcgtgagtgatcacgatcaatgcaccaggatattgttttaaatgttcttccaaccattcaaccgttgcatggtcaagatggttcgtcggctcgtcgagtaatagcaaatcagctggctgaatgagtgcccgcgccaaggcaacacgttttttctggccacctgacaacgtgccaagcttcgccgaaagggccgaaaccccaagtttgctaagaatggttttcgcctgtgtagccgcttcccaagcgccaacgcggtccatttcctcttgccatttcagaagctcagtttggctcttgttatcgtgtgggtgtgcctctaagttttgaagcgccttttcatagctcgctaccgttcgcatcaacgtcgattcgctcttgtaaatatagcgaatggctgtttcattttctggcatgtcgagctgttgcggcaagtattctagcgtaaaatcattggcatgaaacaaagcgcccccatcaaacccttcgactccggcgagcccttttaacaacgtcgatttgcctgtgccattaacgccaagcaagccaattctgtcgcctttttctaaactaaagtgaatcgattcaaaacaaatcttgtcgccaaaagactttgttagcccttctgctcgaagtaaactcatgtgcatcttcctttaatgttcttctattatccctttcctacaatagggtggcttttcttggaagtaattcggcgaaacgatgcgattatcaaacgactggtgaaaaatatccgtctgcgctggggacatcggcgggattagccacgtccagtcgcctgtcacgccgcgccctgcttctgtttcattgccaataaaacgttgaaactgttttgcggcagtatggtgatcgactatgcttacgccttgttcctgatacgaatagagaacagcacggtttaattcaacaagcgcttgatcgcgccatagggatgcttcacgctccatgctgattccgagcacggcagccacttctggcaagcggttatagcggaaatcatcggctaaattgcgggcgccgatttccgtgcccatataccaaccgttaaacggcgctgcgtaataagaaatgccgccaatttctaggcgcatatttgatataaacggcactgcgtaccatttaaggttcagccttgcaaatgcttcgttatcaggatggacaagggccacttctttaatcagatgctcggggatagggaatagctgagggggacgtgcacccaccgatatgacaaggggtagcacatcaaaatcgccccctgcaccaacccagccaagctgcttgcaaatgtccgttaattcaagggaagcaggatcgccaataatgcggccatcaccgcgatagcctgcataacggacaagttgcgcattccaaatgcggattgaagccccttgtttaaacaccgtaatcgtcggaataattttcccgccgtttgtcgcatattcaatatgcctaaaaagcgcttgtgcgaccgcttcttctgtacgtgcttcccgttcatcaataacggtaagccgttcccaaaataagcggccaatgcaacgattgctgttgcgccaagcgagcctcgccccaaatgcaagctcctcagccgtatgctcgtatgtgccgtctgtacggatcgcttcgcaaacgtcgcgaatccgcgcttctttgccgtctaagcaacgctcctcgtaaaaaagggaaagaaactcaacagcctcatcttccaaacgatttgccatattgccatcctcctaaaaaaactgtgcagcgtcctatgctgcacagccttttctatgcatcggccttcagttcttcgatgacatctgcttcaatcgtttccggttttgtagcaggcgcataacgcttaatgacttcgccttttcggttgacgagaaatttcgtgaagttccatttaatctcttcgctcaacattccctttttggccgctttcaaataattgaacaacgggttggcatgtttgcctttcacatctgtttttgcaaacagtgggaacgtaacgccgaaattgattttacacacctgttccatgtcttcatcggcaaccggctcctggtttaaaaattggttgcttggaaagccgagcacataaaagcctttttccttatagtcattgtacagcttttcaagccctgcaaactgtgaagcaaagccgcatttagttgcggtattgacaatgagcaaaacattgcctttgtaagctgataatgaaacgtcttggccgttactcgttttaaccgaaaagtcgtacacagacaaacgggttcgctccttttactttaagtatactgcggtttggcaccaattaaaaccgatttgtttcaccggtcgagcagcagctaaatcgtccccactatgaaaactgccatcgatttaagggttgcgtctggcaaaatcaacaaatcggaagcggtccgcacgatggcgtgactctgtgtactggaaaggcacagcattgtcaaaatacgtatagcttctgacaacgactacacggccactttcatcgaggtcaagcatggcctcgtcttcctcagtcgccgcttcaacgacaatttcctttttggcaaagctgatagcaaggcctagttgcttctcaatgtaggcataaatgctgcccgcacaaatgtctttcgttaaaccagggacaagactggaaacaaacgtgtccttatccaatataattcgttccccatcaattaagcggattcgctccacttgccaaacttgctcacctgtttcaatttccaacttttttgcgattgttttatctgctttaacagctgtaaagcagacgacatccgtcttagcttgcaaaccaagcttttcatttagttcttggaagcttgcaacgcctgaaaccgggaaatcgaggcgtgcgacatcaagcacaacagaacctctgccttgtatcttttgaatatacccgtgttctgataacattttcagtgctttgcgaatcgtttccctcgatgcttggaacatctctgtcagttcgttttcagaaggcaacgtttcgccaggagcataaacaccgctattgattgcttgtatgagcgcttgataaatcgattgaaacttgtttttcacgtgcttctcttactccttcaactggaatgctaccgtttcataaggcttgagcgaaaatgttttttccagttttcgtttttggttgtagttgcttattaactgtgtcgcttttaatgataccagatcttctgggcattcaaaatcgcaatttacagggtaaaaatttgaaacgacaaggagtttttccgtaccatccgtgcgcacgtatgcaaatacatggtcatgttcaggcacgagcaagcggtaatcacctgttgtcacaattggcagctttttccgcagcgcaatgagcttttgatagaaataaaaaatcgaatttgggtcactgagcgcttttttggcattgatctccttgtaattgctgctcacctttatccatggcgtgcccgttgtaaatccagcttgctcgcttgaatcccattggaccggcgtccgagagttgtcccgggatttctgtttaaggatcgcgagaatatgttcttcaggcacaccctcttcttttaagcgagcgtacacattcaatgactctacgtcgcggtaatcgtcgatgctggtgaaattcgggtttgtcatgccgaactcttcaccctgatacacatagggcgtcccttgcatgaaatggatggtcgcagccaacatcttcgctgattggttatggtattcgtcctcatcgccataacggctaacaacccgcggctggtcgtggttgcaccaaaacaacgcattccatcccccgccttcatgcatacggacttgccattccgataaaatctgttttagcgctttaaaatcaaaatcagcgacagcccatttttctccatttggataatccacttttaaatggtggaaattaaacgtcattgacagttcacgctgttttggattggaatagcgtatacagtcttcaatcgtcgttgaagacatttcgccaacggttaagctatcatacttggctaatacttctcggttcatttcctgcaagtattcatggacacgggggccatctgtgtaaaatttgcggccgtcccctggcgcaactgaaccatcatcgtcagggaagcgttggtctttcgatattaagttaatgacatcaagacggaagccatcaatgcctttattaaaccaaaaatgcatcatctcgtagacatgcttgcgcagttgttcgttttcccagtttaagtctgcttgcgtgacatcaaacaaatgcaagtagtaatcatctgttgcttcattgtattcccacgcagaaccgccaaacttcgattgccaatttgttggtgcacctccgtctttgccttctttccaaatataaaaatcacggtacttcgcttgtttgcttagcttcgcatttttaaaccattgatgttcagtcgacgtatggttgacaaccaagtccataattagcttcattccccgtttatgggtttcattaaggagttcttcaaagtcggccatcgtcccatagtcttcatgaatcgcataataatcggaaatgtcatagccattgtcattttgcggggaagcataaatcggcgttaaccaaatgacgtcgatgcctagttcttttaaatagtctagcttttcaatgatcccttgcaaatcgccaatgccatttcccgtcgtatcgttaaagcttttagggtaaatttgataaaccgtacttgttctccaccattccatttgtgtttatccacctttctctgtctctatttaccaccagtttagcacacttgtatatacaagttcaaaaaaggaactgctaggcagttccttgaggttgtctttaatggtcttcctgcaaactttttggctgacggagcctgccgtataacaatgtaatgaggaatggcagtacaatcacgatcgccatgccaataaagaatgggatccagtctgttggacgaatcgatacgaagccaggcacgccccctacgccgatcgaattggcgatgacgttttgcatggtaataaacataccggcgattcccgcacttacaattgccgcataaaacgggaagcggaagcgcaagttgacaccgaaaagggcgggttctgtaatgccgagccaagctgataaacctgatgtccccgctagcccttttaaattggcatttttgacgagaaaatacatcgcaaacgcagctgaaccttgggcaatattagacagcgccaaaattggccacaagaacgtgccgttgcctgaaccaacgagttgcaaatcgacagcaaggaatgtatggtgcatccccgtaatgacaagggggccataaataattccgtataagaaacctgcaatccaaggcagtgtcgcaaacagccaaataaaaccatcggcaatccaattcccaattgcaaatgtaagcgggcctactgcaataaatgtaataaaacttgtgatgagcaatgctaacggagcaaccgtcagtaaatggaacgcgtctggtatccgtttgcgcaagaatagttccaacttggctaaaatgatcgatgccacaaatacaggaagcacttgcccttgatagccaagtttattgatttcaagaccaaataaattccaagttgggatttcccccgcctcacgggcagcgccataatcccaggcgtttaacaatgcaggatggactaggattagccccatcacaattccaagcaatgggttgccgccaaaacgtttgactgcagaccacccaatcagtgctggcaaaaacgtgaacgctgtattagcgataacgtggataatgtcagcaaaatcagcccactgtgggtgaacgtcaataatggacgcccctgtgtaaaaaatgtcatttcccgttaaaatgttgttgatgcccattaacaaaccggctgtgacaattgccggcaaaatcgggataaagacatccgccagcactttaattgcccgttgcaaagggctcccttttttagcggcttccgctttcacctcgtctttgctttgctcctcgcgccctgtgagagccatcaattccttatatactttatctacaacgccattgccaagaataatctggaattggccgctcgcagtaaacgttccttttactgcttcaattgcctctaaaccgcttgtatccacttcgttttcatcgttaagcacaagccgaagccgtgttacgcaatgcgttgccgaagaaatattttcctcgccacctatagcggcaagaatctgttccgctgtttcacggtagttaattgccatctgttgctcctcctctgtcagcgttttcaaaacgctcattttccatgtatccttggaatttgtatatacaaatatggatgataacgcttcaataataacctgtatatacaaatacgtcaatgggttcagcttggtcttgagctaattcctctccctattttgagcaatagtgctttattttacttctaagaagttaaaaaaacagatcctattcggttttgcctcaatatacatagcttcctattccatggtacaatcgactttatgataaggagggactttgaaatgaatcatgatccacacttgcatccatacccatcaactcgaatgcctgtttacgcaaaaaatgggatggtagcgacatcgcagcctttagcagcacaagcagggctagagattttgaaacaaggcggaaatgcgattgatgcggcgattgcaactgctgcctgtttaaccgttgtcgagccttgttcaaatggaatcggcggagacgcgtttgcgattgtatggacggagggcaaactccatggcttaaatgggagcggtcctgcccctgcctcaattagcatcgacaatgtaaaacaaaaagggtttgaggaaatccctaaatatggcatgatccctgtaactgtgcctggtgctcctgcaagctgggcagcgttgtctgaacgtttcggcaagttgcctttgattgatgtgttacagcctgccattcgccatgccgaagaaggattcgccctctcccctactgttgcaagacaatggaaagcaagctatgacaaatttaaagcggagaacaacaccgaagaatttcaagcttggttcgagacatttgttccaaacggccacttgccaaaggcaggagagatctggaaatccccggaccatgccgagacattgagaagcattggcgaaaccaaaggggcttccttttataaaggggacctggctgcaaagattgctgcttttttcgagaaacatggcggcttcctatcgaaagccgatttggaaaatttccagccagagtgggtcgacccaatacatgttaactaccgtggttatgatgtgtgggaaattccgccaaacggccaaggactcgtagctcttatggcactgaatatgctcaaccaagttgatattggtgataaagaagcggtagacacgtaccatatgcaaattgaagcaatcaaactggcgtttagcgatggtcaaaaatatattacagatacaaacaatatgagtgaaaaaatcgaagacttgttgagcgatacatacgctaaagagcggcttcgcctcatctcagatgaagcactgctgccaactgccggaaagcctaaagcaagcggaacggtttacttaagtacagccgacgctgatggaaacatggtctcatttatccaatccaattatatgggctttgggtcagggctagttgtacctggtacagggattgccatgcaaaaccgagggcataatttttcgatggatccaaaccacgacaattgcttggcccctaataaacggacctatcatacgattatccctggcttcctcacaaaagatgggaaaccaattggcccatttggcgtgatggggggctttatgcagccgcaaggacatgtccaagtcattatgaatacaattgactttcacctgcatccacaagcagcgcttgattcaccacgttggcaatgggtcgaaggcaagaacattcttttagagccgacattccctcgccatattgctgaagcattggcccgtaaaggccataacatttcaattgccaatgacacgatgccgttcggacggggccaaatcatttggaaagatgaagaaaaaggcacctatgtaggaggaagcgagtccagaacagacggggcggttgcgccttgggaacggattaacaaaacgactagccagctgacaaacgcacatgttgtcggctggctttttctatttctggggccccgttactttgttcgttttttgttgtctctctattatcccaatacaaagaagctcgtcattgctctacacttgaaagtaagcaggttgctgcaaataaatggggaggcgatcatatgaaacaagtaggaatggggctctgcttcacactcgggctgcttgccttcgggacagaggacacatttgcacaagaagaactctcgccaaaacgggaaatgcgtgcagtttggatcgccagcgtcaacaacattgattggccgtcgcgtgctggcttatcggcagagcagcagcaaacggaatttgtatctatgctggacgaaacaaaagaaatggggatgaatgcagtcgttgtccaagtaaaaccgacagcagacagtttttatccatcagagtacggcccgtggtctgaatatttgacagggcaacaaggccaagaccccggttacgatcccctcgccttcatggttgaagaagctcacaaacgcaacttagaattccacgcatgggtgaacccgtaccggattacgatgaaccatacagacatcaaccgtttagccgacggccaccctgccaaagaacatccagattgggtcgtcgcctatggaaaccaactttattttgatccaggtttgccggaagtacgacaatttctcgtagacgctgtccgtgaaatcgtccagaattacgacatcgatgcgattcatatggatgattacttttatccttacccgatcgctggccaagacttcccagatgatgactcctttgcggaacatggtagcgactttacagacaggggagattggcggcgcaacaatgtgaatacgcttgttgcctccctccagcaagcaatcaaagacgaaaaaccttatgtgaaatttggcattagcccattcggagtctggcgcaacagcagcaccgacccaactggctctcatacacgagccggcgtagaaaactatgatgacctttacgccgacacccgccactggatccagaaccgctccgtcgattatattactccgcaaatttattggaacattgggtttgaggcggcggcgtttgatattcttacagattggtggatttcagaaacaactggttcccatactcatttttacgtcgggcaagccgcatacaaagtaggtgtcaataatgtaccggcatggcatgaccctgcggaatacccaaggcaaattgcttacatgcgtgagcgcccagacgtaaaaggcagcatccactttagcttaaaagacttgcgtgccaaccgcctcggcgttaaagaccggcttacaaaaacagaataccagcgtccggcgctaattccagaaatgccatggcttgctgggactgtaccgaaaaaaccgacaaacgtcgatttagtgaaacaaaagaatgggactatgctcaccatcgctgatcctaaaaatgagcatgcggcttattacgccatttaccgatttgacggccaaaaagccggttctttggaaagcaatgaaaacttaatcgccactgtccgcaaagatggacaggaaacaacgtttattgatcacgaagcagcggcaaatcaaacgtacacatacgtcatcactgcattggaccgccttcataatgaaagcaaaaacggcaagaaagccaagcaaaattagaggtttctccccccccctcgcttaaaaaaggggggttccttatttaaatatccagctttctcctggacgcatgagtgcgtttaaattcagctttttgcaaatggtcacgtaatgcaacgaggtaaggagcacagcacccatattcattcctaatatgatgccgtccattttcaagcttggcatcgagccgagggcaatcatgaggcaaaacgaaacggttgttgcgtataacgaatgcaagaacgcgtctttgactaagccaatgccaattaaataggcttgcagcggcgttgaaaaataatggaataagaaataagggatcagtacttgcaagtagcctgccgctggagaaggtccaaaaaaagcggttgtaatcggttctgcaaagaaaaagaaggcgagcacgactggcgcgccatacaccactgtgacaagcaaggacagccgcaagtaatgatggagcacatcgtaatggcgttttgcataagcatccgaaacaattggaatgagcacaactaacaaggcatgggcaataaaagctggaaaaaagccaattgtaaaggcaatgccagacaatttcccatagtggaccatggccacgctttcgatcatccctgcattggacaaagctttcgtaatcaaaaaaggtttaatcgcaaatgtagcggagtgaaaaatgcgcaaacccgttgttggcaatgatacttgcaacagtttttgataaacctcttttttaggcccttttttctggacatgtgcttttttcgtctctcgtattttccctataaatacaataaccaaataaattaatacaaacagttcgcttaattttaatgctagcaacgccataaaaatagcgatgtggctttcaaaggaaaacaatttaaacacgacgagcaaaccagctaattgcgtcgaccgtttcaataaattggccacagcaattttccctgtctcctgggcgcccatcaaataccctcttgccactgacgaaaacgtaatgattggcacgagcagcacgagcatccatctaacgcctgcatgataagagtggagcacacttagatggggaaacacaatcaaggcaccaatcatgacagcaagggcacaaacgaacgcgagttgcagcgctttgccgagtacatgccaatggtagacaggttctttctcggcaattaacttagatacagaaacgggcaattcaatgcttgccaggacgacaacaaatagcattgttggcaaaatcgccatgtacaaaccgaacgcttcatcgccgagctctcttgccaatacaacgttgatcataaactccaaacattcccctacaaacgccgcggcgctcagcacgagaacccctcgaaaaaacgtattcaccgttcatctctcctttttctctctatacaggctatgagacaagatattaaaatatgggtatgtttttgaaagcataaaaaaggcctgcgctcaggtgagtgcaggcctcttttcgttatcaatcatcccatgtgctggcattttttaaaccgggaatgtttttgcttttaaaaacaggattttttccttgttgacgctggctctggtaatccgaaataaccgcaaaggaaatcccgccgattaatagaatcgccattaagttcaccacggtcgtaaaggccataaacacatcagctaaagaccaaacgagttcaatcgcagcaagggaaccgaaaacaaccatagcgacgacgagcaaacggtaaacttggagccaaatggtcccctctttaataaatgctaaattggtttcgccgtagtagtagttgccgacgagcgaagtgaacgaaaaaaagaaaatcgcaatcgcaataaacgggacagcccaaccgccgatgagctcgctcaaggacgcttgtgttaaggcgacgccgtctaccccttctccagcggtttggtaaacattcgtaagcaaaataacaaaagcagtcgcagaacaaatgataatcgtatcaaaaaacacacctaaagattgcacaagcccttgcttgactggatgggatacatcggctgtcgcggcggcgttcgggacacttcccattccagcttcattggaaaacaagcctcgttgcgccccgacaaggagcccggcaaaaatgccgactgtcgcctctttaaacccaaaggcagaaccgataataagagcaaatacttgcggaatttgttgataattgctgatcaccacaaaaaagacaacaccgacataggccactgccataatcggcacaacaattcctgaaaagacagaaatcgaccgaatgccgccaaagataataacccctactgctagagcaatgacgatgccgacagttagtcggtttagcccaaatgcttcatccatagcaacagcaatcgtattcgcttgtagtgaattaaagataaatccaaatgtgaccgcaatcaataaggcaaatacgatgccaagccagcgtttgccaagggccttttcaatataataagcagggccgcctcggaactggccgtcgcgcctttctttgtacacttgggcaagcatgctttctacaaagccagtagccatgccgatggtcgcaatcacccacatccaaaaaatcgcgccagggcctcctgttgtaatcgcaatcgccacccctgagatgttggctgcgcctactcgcgaagcggcgctaatacaaaacgcttgaaaagcagagacttctcccttcttcgtctttttctcggtgacagctcgaaacatttcaggaaacatccggatttgcacaaagtttgaccggaacgttaagtacaggccaacggcaactaaagaaaacacgagaaaataggaagtaatcccgttcatgctatctacgatttgttgaacaacttccataatagctccacctttgcttctcccaaaaatatggttttttccttaagcatcatatcacattttttgctatttaaaagaaaacgccctatttagacttttttcgaattgtccaaaagggccttttcttcaaagccataattcttgatgggaagcagtcactgcctgagcacccgctttaatggcttgctttgcatcttccatcgtctcaattaagccgccggcaatgaccggtatccccgttttcctatggacacggccaatgtaatcgggcaaaatgccaggcaaaagttcgatcacatcaggttttactgtttcagccagatgatagctcgtttcaagcgcaagcgtgtcgagcaaaaagacacgttgaattgcaagaatgccattcttttttgcaattcgaagcatatcgccccgtgttgatattaatccggctggacgaatcacttggcaaagaaattcagcagcagccttatcgctttttaaaccttggattaaatcagcatggagaatcggttttttattttcctcgcgcgctcttttttttactgatgctagtttagacaagtgcaaatccaagacaacgaaatattcatggctgctgttcataatgacctcgaaatctttcattgtcttgattgctggtaaaatcgtttggccgccaaacatcgcttacccgatatcctcaagcgtgtgtatccgccattgttctgccaactcagcctcgtaaatggcccgctgtttgtcgctccacttcaaaacagaagccatagcctccacgattttgtctttataagcgttggctttgtcaatatcaaagagcatataggaagagcggcgtaataagaaatcgacaggcgtgagtgccatttcataggccatcgcgtaacggagcgacgcccatactgcttttggaagcccatatttctctgcttccccatcatttagaaacgcaaacacgtgcgtcacatttgaaccgtaacgtgtgacgagttcagctgcttcagcctcttctaagccaagggtttttccagcttcaatatgggcagcattaaacatgtcgagctggtccgatccacctacttctccacctgataaaaccagtttttttgtctggcacggtttatagaccgcacctgtttcttgttcaagctctttggcgacgatcgagacaatattgtcggccatctttcggtaaccagtcaatttgccgcctgctatcgtcataagcccgctgtctgagtgaaaaatttcgtctttgcgtgaaatatcggatgggcttttgccttcttcatgaataaggggccgcaatcctgaccagcttgactcaatatcggcagttgtgagctgatatcctgggaataaggcatttgttgccttcataatatagtcgacatcttccttcgtcacaccaggttcccgcttatcgcctttataatttgtatcggttgtgcctacatacactttttcaccgcgaggaatcgcaaacatcatgcggccatcgccaaaaggcgtgtcaaaatagagcgcttggtttaaaggcaatctttttttggataataccaagtggacgcctttcgttaaatggatcgtttttccggtctttgagcgatcttgctcacgcaaatggtcgacccatggccccgttgcattgacaactttttttgcctggatcgtgacagcttcacccgtcagcaaatcacgggcaatgacacccgtaattttccctttgtcataaataaatccttccgcttttacatagttcgctaatttcgcgcctttttcagctgctgtttttgcaatttcaatcgttaagcgggcgtcgtccgtgcggtattcgacatacataccggcgccgcgaaggccgtcttttgccaaaatcggctctttttttaatgcatctttcgccttcatcatcgtgcgccgctctgctttcttgacgcctgcaagtcgatcgtagacagcaagcccgattgacgttgttaacgcattaaacgtaccgcctttgtaaaacggcaacatcattcgcacgggctctgtaacatggggtgcattttcatagacgatcgcccgttcagtgccaacttcagcaactaatttaacttcaaattgctttaaataacgaaggccaccatggatcaactttgtcgaccggcttgacgttcccgccgcaaaatcttgcatttcaatcaagccgacatcgattcctcgtgttgccgcatccaaagcggcccctacgccagtaatgccaccaccaataattaatagatctaactgtttgccttccatgcttgcaattgctttttctcttgtctttgctgaaaacgccatctcgattcctccaatatttgaacggaaaaagggaccacaacaaacaaaacaggccttttggcgcctattgaatgctgtgatccctcaattcctcagatccgttcattaacttacattcattatagcgcacttaagctgctgcgtaaacatttagctattttccactcagtgttccctgctaacgcgtctttgaaaccatagaaaaaagcaaacgcacaggccccctgaaggaaataacacctgtgcgttttagctaaatggaaaaccatattatttattttgtcggcttaaaagccattgttgcctcaatcgctgttttccagccaccataaagcgtttcccgctctgttttttccatctccggctcaaacgaacggtcgattttccatttgtcggcaatttcctgtttgtctttccaaaccccgacagccaagccagccaaataggctgcgccaagtgcagttgtctcattaatggttgggcgttcaacaggggcatcaagcaaatcgctttgaaactgcatcaaaaagtcgttcttcaccacaccgccatcggcacgaagttttttcgactctaagccagaatccgattccattgcctccatcacgtcttttgtttggtacgctagtgcttctaatgtagcgcgaacaatgtgttctctcgttgttcctcttgtcaatccatacatggcaccacgtgcatcgctgtcccaataaggcgttcctaatccaacaaatgcaggaacaacatagacaccttccgatgattcaatccgctttgcatatgcttcgctgtccttagcactttctagcagcttgatgccgtcacggagccattggatcgcagagccagcaacaaaaatgcttccttctaatgcatactctactttgccatcaagcccccaggcaatcgttgtgagcaagccattctctgacgtaacggcttcattgcctgtgttcattaaaataaagcaacctgttccatatgtgtttttaaccatgcctttttcaaaacaagcttgtccaaataaagccgcactttggtcacccgcgacgcctgcaatcggtatctgctccccaaagaaatggtattccaccgtattggcatatacttctgacgatgacttcacttcagggagcatcgccttaggaatatccaaaatccgaagcagctcttcgtcccactgcaaatcatgaatgttatacataagcgtccgtgccgcatttgaatagtcggttacgtgcgctttcccgccgctcaatttccaaatcagccatgaatcaattgtgccaaagagcaattcgccgttttcagcccgctcccgggcgccttccacatggtccaaaatccattttacttttgtccctgaaaaataagggtcaatcagcaagcccgtttttctgcgaaacgtttcattgtgtcctgcatcacgcaatgttttgcaaatgtcttctgtttgccgcgactgccatacgagcgcatggtaaaccggcttgcctgtttctttgtcccatacaaccgtggtttcccgctgattcgtaatgcctatcgctttaatttgccgcggttccacatctgtttctgtaaacaggccggaaatgacagagagcgtcgaattccaaatttcatttgcattgtgttccacccagcctgggtggggaaaatactgtttaaattccttttgtactgtatggacgatttctccttcgaggttaaataaaatcgaccgtgtgctcgtcgttccctggtcaattgccaaaatatatgttttctccatccgttatcttcggccctccttgattttttcggttgcatgttccttttatcttatttacctgccttttatcttcttaaaacaaggctagccttatttctgaatctcgcttacaagaagctacaaagccttgtcgtaaagagggagcataatatgaacacatgtgcccttttttggtttgcttgcataagaaacgtggccgcccatcatttcaatcatgcggatggagaccattgttccgatgcccgtaccactgtcttttgtcgtaaaataagcagtgccaatttgttttaattgctcttttgtcatgccaacccctgtatcctcaatggttaacaacagtttctttttagctgttttatccaatttaattaacacggctccatttggaggcgttgcttcgatgccgttcttaataaaattgagaagcgcttgtttaagcttattttggtcggcccatacccaaagcgtttcttcgctgctttcgacagacaactggacatgcccttttgcagcatagggccttagcagtgagacaacagaatgaaccgtttctcctactgaaaaaacacgttgttggtccattttaggttttgctgcacttaaatattcattaatgatcgcttccgcccggttcaattcgccgacaattaatgcgtggtattgatttttcttttcgccttcggccatcagctggacaaaccctttcacaacggttagcggatttctgacttcgtgggcaatcgttgccgcaagttcatttaagctgttgtacttttcggcacgtagcgattcggcaatgacacggtctctctcgagcaatgtctcatatagataagtaattaaaaacatcgcaccaacgccaaaaatcgcatagtaaacggccactccccacatcgcaggcaagtagctatctctgaatagccattgcataatgatcagtgataaagttacttggatcagcactggccataatgacacgaggctgacaaacttgagccttggccatttgcttggcaactggtaaaacctgttcgtaaaaatcgaaaacaataaggcacttagcaaaaaatgcacgagggcaaaacaagtaagatcgccgccgacgatcaaccgaaaaacggctgaaacggcggttacgccccagcccgcccgtttgccaccatataaaaacgcgagcaaaatgggaatatagcgtaaatcccagaaaacgtctccttggcggatggaaaaggacatgcataaaataacagcgccactcatgaaatggaacatcgtaagcgaacgctggattttccagcccccttcggcttttaagctataaatgattaagggaaccataatcacaaacacattgataagaagcttttcaataaccatgcatcccacgttcccctcgcaccatttctctgaactcattcgacacttttcggggcaatcctgcttcttgctaaaatttacaggattgcatccatttgttttgtttgttgcatctcgtaataaaacccttttgtcgccatcagttcatggtggcttcctgcctccgtgacctgtcctccctgtaaaacaagaatttggtcagcggcttcaatcgtatttaagcggtgggcaatgacaaagcttgtgcgcccatgcatcaaccgttttaacgcttcttggatcttcatttccgtcaccgtatcaatactagatgtcgcttcatccaaaatcaaaattgacggattagcaagcagcgctcgggcaatcgacaataactgtttttgcccttggctaatgccgctgccatcttggaaaagcatcgtctcgtatccatttggcaagtgggaaataaacccatgagcatttgccaacttagccgcttcttccacttcttgatccgatgcctcgaggcgaccgtagcggatgttttcacgaatggtgccttgaaataaaaatggatcctgaagaacaacgcccatttgcgagcgtacatcgtcttttttcaaatgagcaagattgtttccatcgatgaaaatcgctccctcattcactgggtaaaaaccaagcagcaagttaaggattgtcgtcttcccggctccagtagggccgacaaaggcaatcgtctcccctgctttcgcagtaaaggagacatttttgagcgtttctgtagcgccataggagaaacagacattttgaaacgcgacatttccgtctatttgcttgaccgcgctggcgcctgcttgatccgtttcaggctcttcatcgattaccgcaaatacacgctccgcaccggctagcgctgataaaaccgcattaaattgattggcaagatcgtttagcggccgtgtaaactgacgggaatactcgacaaacacgacaatcacaccaaccgttaccccagccattccatgaacagcaagaaacccaccaatcccagcaataacggcaaaactgagattgttcaacacattcattagttttgggataaaaccagaatagacttgcgcccagaaaccagcatgacgcaacgccccattatattcctcaaacgcttcaataatcgtgtcttcccgtgaaaaagtttttacgactgattggccagcaatggtttcttccgaatagccgttaagctgccctaagcttttttgctgttctttgaaaaacacttttgttcgctttgtaatccaccgcattcctacaaccattaatggcacaatgaataaagtgatccctgtaagcaagggcgacaagtataacataacagctagaatgccaataaaagtgacgacacttgaaatgatttgcacaatggacgaattcaacgtcgccgaaatattttcaatgtcgtttgtcatacggctcatcaaatctccgtgcttgtgtttgtcaaaaaaaccgattggcaacttttgcaattgggcaaataaatctttacggatcgcaaacacagtcgcctgtgcgattttgaccatcataaagttttgcaaaaacgttgaaatgcttaaagcggcgtacgaaccaagcaaaaagagcaatatgatctccaaaccgccaaaatcagtaggaatgatatagtcatcaatgacaacgccgattaaaaaaggaccggccagcgtcaatacagcgctggcaaaaacaagcgccatgacaagaaaaagtgcccctttttgccttgtcaaataagcaaaaattcttttggccgctcctttcccatccttggctgtctctggccgtcctccagccctggcagcgtgtggatgctggggctggctgcttgttgcctgagactggcgggacgcgcgccaattgatggttttataccgaaatggctctgttaatgcggaacgaagcctcatcctcacgcctccttgccatattgcgacttataaatttttttatagaacggcgatgaccgcagcaactcttcgtggctgccgaagccaaccagttcgccgtattcaagcaataaaatccggtctgcctgagtcgccgttgacaatttttgcgtaaccatcatcgtcgtgcatggttgttgctctaacgccttgagaaaacgggcttctgttttcgcatcaagggcgcttgtactgtcatcaagaagcaacattttcggcttgcctagcagggcacgggcaatggaaatccgctgtttttggcctcctgacaaattgacgccttgctggccaacaatcgtgtcgtacccatctggcaagcgtacaatcgcctcatgaatttgcgccactttagcaactgcttcgatttcttcagcagatgcttctggaaagccccaggcaatgttttcccgaatcgtcccggagaacaaccggaccgcttgcgggacatagccaatttgcctgcgcagcttttgaacttgccacgctgtaacggatgttccatcaatgcgaaccgttccttttgtcggttcataaagttttggaatgagctggaataatgttgattttccagaacctgtttccccaagaacggcaactgtttcattcgcctttacagcgaaatcgatgtttttcaacacaaagggagcccactctgcataagaaaacgatacatgttcaaagcgcagctcccctttcatagctgggggctcaggctttgcctcgctttcctttagttcgtcatcaggctctagcagcacttcctcaattcgcgttgccgaggctctagcccgggaaaagacgataataatcatcgaaaaaaccgttaacgcagaagtaattcgcgttgcatagttgacaatcgccacaacatcgccaacttgtgtcgcaccattgccaatgtcaatgctcccaaaccaaaggacaagcaaaatcgagccgttcattaaaaacagcaaaacaggcaatgtcaattccattaggcgaaaagcttttaccgtccgatccatcagcttgttgctttcccgaaaaaaacgctgcgcctcctcggctttgcgcacaaaaacgcggatcacacgaatgccagtcaaattttctcgtaccacatggttgactgaatcgacttttgcttgaacttcactaaaaatatgtacgcctttctttaaaatccacattagaaagaggatgatcggtgggatcgtaatgaataaaaacaatgctaaacgagcattgacagcaaatgccatcacgcacccgccaatgataagcaacggtgctctagccataatgcgtaggctcataaaaaccgtattttggatttgtgttacgtcattagacaaccttgtcatcaaagaggatgtttcaaatggctgcaacttttcaaggctcgaacgctggatcgttttaaacatcgcattgcggatatcaaaccctgtgctttggccagcgtggcctgcataaaaggagtttagcacgccggctataaacgctaataacgaaaggccgaccaatacgcctccccacacaaaaacagtctttaaatcattttcgataatcccgtcgtcaataatccgggcaagcaagagcggttgaattagttccacagccaactcaagcaacataaaagcaaaagcaatcactgctgctgctttataaggaagcaaataggaaaaaacagttttcacagtaacgcccctcttcctgcaccaaccaccacagttcttattttatattattttcctatcatagcttattttttgtcttcgttctattatattatcctatagccgaaagcaatatcgcccattcatttgttctaactgcatgccaaggtgcccgcagacagaacgtcctctaccgttgttgttattttgagtagaaaacgctaaattgtttgtaggaaatgaatagcccgatctccctggaaataaaaaaactttctggggagatcccacagaaagtttacgctgcaacgaacaacgataagagtattttgcctactaaactatgcccccgccgacattgcaattaaaacagctcctactacaccgaccacaaaaacggctgaaaggattttcacaaactttgcgttcactaaagtcactccctattgcaaatctagcttgaacgaaagaaattagccgcttaaccaaacagctcgacgttatttgacacttttcttaagtatacaacggctagcacttagaaactatgtaaatttatctttatcatctccaaatttagcaaaaaacgttcgaaaactgacagacccttccttttaaccaggacttactaacaggaagattgtatgtgaacatctttaaaatgagcaagacacctgctttcctactgaaatatttttgcaaaaaagacgaggtgtcagctcattgacaatcaaggagccaagatcggggacaacgcaccgtcataccaaacagtcagttcatgaagggcccgtgtgcaacccacatacaatagttttttatggagttcatcacaagggtaatggtcgtttgttacatcagttagtaagacagcatcaaattcaaatccttttgaaagataaacaggcaaaacagaaatgccgccctcatacctttctcctcctgctataagcaaatgggcatcaaagcccgctgcttgtagctgcctgcaaatggctgtgctagctttttctgtacgtgtaagaacggcgatggtttgtgtttgtttatcctgcatcgcctttacccagtgcgccacatgttccgtcggcctctgttccacaaccacgtcttgcccgctgcgaaaaacaggttttgctggcgcaggagcgaaagccatttgctgaaggatccggttcgaaaattcaataatttccatcgttgaccggtaactccgctccatttgtacataggaaacgttgttggcaaatacctcttcaaaggcagcccagttcgaaattccttcgtctccgtgaatcccttgggctagatcccctaatatcgtaaatcctcctgcgcgcgtccgctcttttaaaacagctagcataaaaggggatacatcttgcgcttcatcgataacaacatggtcgaagcgagcgtcgcgctcaattccgtaaagctgttggtgcatgtacacaagtggagctatatcttcgtagcctaaccgcttctctttcagactagcaggcactggcagttgctgttcttttaaaaaagcggtgtacaacttagcaagatcaggcttggaccagtaggaaagaaaggagcgcaaacgtttaagcgcttccgacttaaaagcctgttgttcttttttgtcttcaaagcgctttgcttcgatctcaatccatcgtttcgcgcgggcatgaaagcgctcccgccgtttcattggcggcgaagcggcaaaatcctgctcaatccactgtttcattgtttctttgttcagcacgcagccgtcccacgggcaaaaatcttttttgggcaccctttcccctacataagcatcaataaaacgacgcatttgcttttggcatgcaagcgagcctttataagcaagcacatcttctgactgctgttcaagtttcgattcaaattgattggccaagcgttttttcgtgtcataaagctgataagaagaaccaagcaccgacaacccccagttggcaaatgtactttgggcaatcgttcctactccgagctccggcaggacgtgtgaaatataatcgagaaacatcgcgtttggcgcaaaaatcaccattttctcagctcgtagctgctcgcggaattcatacaacaaataggcaaggcgatgcaaggcgactgtcgttttcccgcttccagcagctccttggataataagcggttctttgattgcatggcgaatgatcgcgttttgttctgcttgaatggtcgcgacaatgtctttcaatttgttgtctttttgctcgcttaacttatataacaaaaattcatcgccgccgctcatttcttgccctttcgcatagctatccacgacccgctgcagacggcgatttcgaatcacaatgtttcgcttcagcaaaatttcaccttcgactatgccttccggtgattgataaaaaacatcttcctcacttcctgtaaacgaataaaacagtgaggcaaccggtgcgcgccaatcaattacgaacggatcgccgctgtcttcatcgtgaacgccgacttttccaatatagagcgcttttgtttcctggtcccattcacaaaagtcgagcctgccaaaatacggttcttgtctggctgaatgaagcgctgtacgtaaatgctcacgcctatcttccagcacttgttccgtaaaatcgctcccgcggtagcgcggcacctgctccagcttatcgcctagttcatccagtcgggcaagcgtcgcctgcaactgcgcctcttcggcttcaaatatggacatcgtatcactcctcctaaaagttcttctctattgtcgcgaaaaacgaaaaaaaagaatagactttttcttttcgttttggtaagctttatatagttcaagtgccaaaaataaatatgccattatatggaaaccttcaccgaagattcgctcttttggtgaaggttttttgtatattgtctgatgatcttccattgttttttaaggctcgtttacaataaaaacatcgattctataaaatccgtatttgcttttcctctataataaaatagggtttgtttgtaaaaagattgatcgattaggaggctgctataataggagttttgccgtattggtgtcggacagcgattgaacaaccaaaaagtggctttacgactcttacttctgctttttgattgttacaatcgcgctcgttgtcgaaaaaacgattcttgacggtttcacaaacaaattctacaattattgagaaagctacatttttaacgaataattagggggacaatcacattgaaaaagaaagtttttggctcgtcacttgtagctgttactgccctagttcttgccgcgtgcggcggaaatgacacgaactcaggtaacggaggcgacagtgaggacggctattcgccaacagatgttctaaaagtgcaatttgttccatcacaaaacgctgaaaatcttgatgtgattgcagcgccgctagaagagctgctttcagaaaggctagatattgacgtagaggtgtctgtgtcgacagactatccgtctgttgtaacagcgatgggttcaaaaacgatcgatgtcggtttcttgccgccaaatgcctatgtaacagcgaatgaagaaggctatgcagatgtactgctccaatcgttgcgctatggtgtaaatgaagaggacgggtcccaaacggacgaactagttaactcgtacaaatctcaattcgtcgtgatggcagactctgatatcgagtcccttgaagatttagaaggcaaaaccatcgctttccaaggcgccacttcctcagcaggatatgtatggccagcagcttctttgcttgacgcaggcattgacccgcaaaatgacgtaaagggcgttgaatttcaagggcatgacgctgcgcttattgcgcttctcaatggcgaagtcgacgcagccgtaactttccaagatgcacgtaatacgattaaagaagaattccctgacgtgtgggagcaaacccgagttgtggctttaacagaagacattccaaatgataccgtttccgttcgctctgatctgtctcaagagtggcgcgacaaaattgctgatgcctttattgagatcggcgaagacccagaagggcgccaaatcatttttgatatttattcccacgaagggtacgagctttcagaggacagcaattttgacatcgtccgtgattatgcggaacgaatccaacaaccataaggatcaatagaacgttactttcatttattcatagcgagagtccgccttgcgggctctccacttatgtattgtatggccatttccctatcatgatcagtttataagagagttgggataccgatgatcgaaataaaaaatgtatcgaaaacctatccaaacgggacgaaaggcttaaaaaatattgatttaacgattgagcgaggcgaatttgttgtcgtcgtcggcctgtctggggcgggaaaatcaacattgcttcgttccattaaccgattaaatgaaattactgacggcgaaattctcattgacggcctatccattacgaaagcaaaaggaaaggaattgcggcaaatacggcaaagaacggcgatgatttttcagagctttaatcttgtaaaacgttcctctgtcttgcgcaacgtgctgtcaggccgcgtcggttaccatggaacattgcggaccgttttaaatttatttcctaagcaagatgtcgagcttgccttgcaagcgctcaaccgtgtcaatatccttgaaaaagcctattcccgagcaagtgatttgtctggcggccaacaacagcgtgtagcgatcgctagagcacttgcacaagaaccaagcgtcattttagcagacgaaccaaccgcttctctcgacccattgacaacgaaacaagttatggacgatttaaaacgcattaataaagaagacaagattacaacaattgtcaacttgcattttattgatttggcacgagagtatgcgacacggattattggcctccgggctggcgaggttgtatttgacggtcctgtctcagaagcaacagatgaaaaatttgctgaaatttacgggcgcccgattcaagaggacgagctcttaggggaggaattggatgaaccagcaagcgaacatgccagtcaataagcccccccggacaaaactttatatgacattattgctgctatttgcccttataggcgcgagcgcttggtacatagatgcaaacccgctcattattttaagcaagtggcaaaatgtatttgaactcgtctttaaaatgtttccacctgatatgactttttttgtgaatgcgacacaggcaatgcttgatacgatccgaatggcattaattggtacgacgataggcggaatcatctccatcccgattttattcctttgcgcacacaatattgtcaatacgccttggatttaccaacctgcccggattgtcttgaatatgctgcggacagtgccagatttgttgctcgccgccatctttgccgccattcttggtttcaacacattagccggcgtagtggcgcttagcatcttttcaatcggaatcattgccaagctttcatttgaagcggtggaaaacatcgaccaggggccgttggaatcaatgacatcggttggcgccaacaaaatccaatggatcgtctttggcgtcgttccgcaagtgttgcctcaatttacgtcctatgttctatacacattcgaaattaatgtccgtgccgctgcgattttagggttagttggagctggaggcattggacttttatacaaacaggcaattggcttttacaattttgaccaagtattggcgttaatcctttatacatttttagttgtattgctaatcgattttattagcttaaaaattcgggagcgtctcatatgagtgatttaagaagcacaatcgaaaagccgaaaaagcgccggatccaatcagccgcgattattcttgggctgctgctcctttacatttggggctttggcggcattgattatagcggaattacgaaaaatgcctgggtgattacaggcgcgatcatggacggatttttaaatcctgattggtcttatgtataccgtccaggcgaagtcgatttaatttcaaatttgcttgaaacgtttgccattgctcttgttggcattagcctctctgtcgttctttcctttccaattgcattttgggcagcgagaaacttaagcgtaaagcgaattgtctcaggatcagggaagtcctttttaagctttttccgtacattccctgatatggtcatggcgttgctatttattgcgattgttggccctggcccgtatgctggaatgctcgcccttggctttagtgcgatcggcatgcttggcaaattatacgccgaagaaattgaatcgattgatcccggccctgcagaagcgctcgttgccgctggggcaaacaaattgcaaatcctctggtttgcggtcgttccccaagtgttgcctggctttatttctgcgacattgtaccgatttgaaatcaatatgcgctcggcttcgacacttggtgtggtcgctgctggagggattggcacgccgcttttgtttgccattcaaggcagaagttgggaccgtgtcggcattattttgattggcttagtcgtatttgtgttgatcattgatttaatttccagcgcattgcgcaaaaaagttgtgtaattgtcagattgagcgaaaatgcttgtttctctccagtctgaccaatgccaaattagctggcatgcatgattctttttaggaggataaacgttgccatcgattttatttattggcgctggccgcatggctgaagcgattttttccgggttgttgcgccagcctaagcaaccatttgattcaatttatgtcaccaatcgcacgaacaaagagcgccttggcgagctagcacaacgttatgccattacgccagttgacacacatggagcgattgccgcaaaggcagatgtccttctgttagcgatgccaccgtctgcccatggagaagtcctttccgagttggcccctatgattcgcggccaactcatcatcaccgttgctgctggaattggtccgagtgacatggaagcacaattgccggaaggaacagcagcggcatggattatgccgaatacggcggcacaagttggcacatcgatcagcctctacgcattcgggaaaaacgtagctgaaaagcaaaagctgctcgtgaaagagattgttcacgccattggagcaggggaagagctatcggaagagcaaattcatgatttaaccgcgatcacgggcagtgcgccggcttttgtctatgaattcgcgctgcaactggaaaaaatggctttatcctatggcatcaccgataaacaagcgcggcatttggtaaaaacgatgcttgctggcagcgtaaagatgttagaaacaggcgctcccccgcaggaactgcgtgaccaagtgacgacgcctggcggtgcgactgaggcagggcttgtttcccttggcaatgaccacttttccgcgatgcttgaacgtgcggttcatgctgtgacagaccacgcaaaaaacaaacgaaattaactactacatggatctttttagaaagcggcctataaatgaacgaaaaaccgctgatagcaaacactgttatcagcggtttttatgcactctttttaacgtgacggtaccattaaagtcctttatcctccctaaaaacaatccggttccgctttaaataaacgaggataaatgccaatactgctagttcggcgaacggaatggatagccagatcgcattggcgccaaacacaaacgggatggtaagaagaaacagtagcataaaaaaaatctctctgcctgcggtaatccacgtcgctactgccacagaaccaattgattgaaaataactcattaagacaaaattaatccccatgacaaaataagcaatgaaaaacaagcgtatcccaagggtagccatttcctttacttcagtgggaaaatcaccaaataaatggacaatcggtgtagctgccacttggccaattaagaagcaagccgccccagcgataaaagcagtccttatagcgattcgcataatcgcccgttttttcgcggtttcatctgctccgtggaagtagctgatgatcggctgaatcgccgatcccattcctaagaacataagcaacatgacgccatgaacataatttaaaacagaaaaagccgctacgcccactgtgcccgctaaacgggcaaacataatgttatgtgaaatcgtaaatacagaaatgcctacttcagcaagaaaacttgggaagccaaatgtaaacgctttgaccgttaaaggcttttcaaatctaaatggaacaagtttgagattgcttttcttcgtaaaaaaatgggtagtgagcacaagcaaccctaatgttgccgccaaaatcgtgccaaacgcaatttcacgaacccccatatcaaacacatataaaatcatatagttgatccctacattggaaaaagcggttgttacaagcgctgccatcgccaagtttggattgccgtcattgcgtacaaaaatgctaaacgcattttccaatgtgaaaacaaagccaaacactaaaaatacattcatataatcagcggcaaacggagccgtttcatcattggcgcccagcgcataaacgagcggttcatggaacatccaagcaatgaagccaatgatcagtgtgcctgacccaattaagactaaagaatgggtaaaaataaatcgggcacgctcgggctcttttcgccccatgctctgagagtacaaggtcgcaccgccaatgccaagccaaagggacattgcgacaaacacggtgtataccggtccagcaatattaacgccagcaagagcgactgggcccaatttatttccgaccataattccatcaaccgccaagttgacagccattaaaatcatcccaactaatgatgggattaaataacggagaaatattttccctattggttgtgtgtctaaaggattttgtgtatgttgtgtactcacgtatcttcccctgccataattcctcgccaaaaaacggcccagccagcagccgtctttttcttgattctttctttatctgccccatacacgagctcaatagccaaagcatccaacaatgccataaaagcaagcgtcggcgtttccgggttttggcttccgattcgtttcgcctttatcgctttcgcaaacaactgatagatgagcctttcaatttgctcctcattgcgcataaagatctcctcaacttcatcataaaggtgaacgggcgggaaaaacgaaattcgcagccaaaagaaaaaccgttcatcttcctctacaagtcgtttatgttcagacacataacggtaaagttgttgttcaaaggcttcgtcttcgaagtcttcgagcagctgctttttcatacccaattccaactcagccacatcatgaacgacttgcataaacaaatcgtctttcccgtcaaaatgcgtataaatgctctgtttctttatgcccgcttcatgggcgatttgcgacaacgatgcgccttcatagccatgccgtgaaaaaaatttaaacgcggcggctttaatgtctttagctgtcattttccaccccaccttccgaacgttcgtcaggaaattatagcaaatgctgctcggaaagactagttttattttttaagagaacgagccagcttggaagcacatggcatcacaagctggctcattttttctaggaaaggtcgatttttgtgattgtttgacctactagatcgacgtgaaaaacttcggggcactgcatttgtttccattgctgaaaaccaaattgtggatcgattgtatgcaacagcaacgaaattaggtttccatggctaacaatgacagtgggttcttcagtttttgcggcttcctccacaacggccaatatccgcttttttgcttgattggatgactcgccacctggccattgtttgtccatgtcgtgaaaactgctctctaacaattccaaccaattgtctgccggtttcccgcataaaacccgttcctgtaaacgttggtcttgctttatacgaagcgctaatttttctgcggttggtttagcggtcgccactgcacgggcaaatgggcttgaaacgatatgtttaatgccttttcgatgaaaaaaatcagctaagcgttcagcatcgctttcccccttatttgttaagggagcatcgggctgttgcccagttgcctcggcatgccgaacgatatataaggatgatttcagtgtttacgcctcctttacatcttccttaaactcatgggaaaataatgaaaaacagacaaggagtttccctatgcacatccaactgtcagatggctgtctcgtctatgcgaataagcgtgtcaccggattaccaacactcttcctacatggcggccctggatattggagcggctcttttgaacagctcgctggccccatattggagaaaacaagaacaatgatttaccttgatcaacgaggttgcggtcgttcacaacatgcgccttcgtctacctaccgttatgaccgcttgcttacagatatggaagaagtccgccgtttttttggctttcacaagtggagcgtgttcggccactcgtttggcggcttactcgcctttctctatgccttacagtaccctaaccgggtagattcgttaattttatgcaatacgacgttgtatatggctgaatcgttaacctatcaactaaagtacgggagcaatcttctcgggaaaaccgttaacccgcctacacaaacaagtttattggtgaagcactttcaagataccattatccaactccgtgaagcgggaaactgggaacgtatccagtttcaacacaccgcacatgcaaagcggttagaacaggccgacgatcgccccgataaccaaagcgaccatcgctttcagcaggcattcttgcattctgacttgttcgcaatcgattatcgaaaacggacaactgaatttgttaagcctgtcctcattcttgcaggcaagcatgatcatgcaatcggccctcaccattatcagcgtttctcgtttccaaaccaacaaatcgcgctacttgattgtggccatcatccttacgctgaagatgttgcaagtttttacaaggatattgaacaattctcaagtgtgaagctgtaaacagacaaggggctaatggtgtttacgactcgtagatgctttcgccccttaacgctgcattcataaccgattgccttatttccccttcattttcgggtccaatgcatcgcgcaacccatcaccgatcatgttaaagccaagcacgactagcataatcgacaagcctgggaaaaggacagaccagtaggcgttttgaatatagcctcttgaatcagcaagcattttgccccactctggcgtcggcgggctcgcccccatgccgagaaagccaagtgcggccgcttcaataatcgcgacgccaaatcctaacgtcgcctggacaatgatcggcgccatgctgttcgggagaatatggtggaacagcaaacggccgtttttcattccttgggcacgagccgccattacgaattcttcctgtttaaggctgatgactttagaccgtacaagtcgtgcaaaaatcggcacgttaataatcgcaatggctagcatcgcgttggaaagcgacgggccaagaatagcgacaatggcaatcgccagcaaaatgctcggaaaagcaagcatcacatcaaagacacgggaaagaagcatatcaacccactttccgtaaaagcctgcaatcagcccgagcagcgtaccgacaaccattgcaccgacgacggcgaaaaagccgatcaaaagggaaatccgcgctccataagcgactcttgtaaacacgtcgcggccgagatcgtccgtaccaaaccaatgatcgccagaagggggcaataaccgaatcgacgaattggtttcagcaaatgaatacggcgttaaataaggggccagcaatgcgagtaatagaaaacagataataatgattaaaccaattaaagatagtttattttcgattagctgaacaatcatagtcgcccatggagactttgctttgttctcctttttatctggacgcttgggagatgggtttgttgctaactgcgtttccgtttccacatccggtcccccctaatcatatttaatccgcgggtcaatggcggcataaagcaaatcaaccactaaattgatacaaacaaaaatgaaggcgatcacaagaatccctgattgaatgaccggataatcccggtatgaaatggcgtcataaatgtagcgtccaatccctggccaactgaatatcgtctccgttaaaatcgcaccacctaaaagagtgcccgcttgtaaaccaacgactgtgatgacagggataaaagcgtttttcaaggcatgcttgtagatgacaacagactggttcgacccttttgcttggacagtgcgaatataatcagaccggagcacttcaagcatgcttgaacgggtcatcctggcaatgatcgccatcggaatggtgccaagggcaaccattggcaagactaagtgtttgagcgtcgtctctaattgttgccagttcccagtcaatgctgcatctaaaatataaagatgtgtgatcgcttcaactggttcacgaggattgttgcggccaaaagctggaaaccagccaagctcctgggcaaaaaaccattgttccattaatgcgagccagaagacgggcatggaaacgccaatcagtgcgataaccatgcttgtatagtcaaaaatcgagttttgcttccaggcgctaataattccggcgttgacgccaacaaaaatcgcaaacaacatcgcaaaaacggttaactctaatgttccggccaaatacggccacatttcttgagcaatgtcattattcgtcctaagggaaacccctaagtcgcctgatagcaaatcggatatgtaaacgccatactgcacccaaaacggctcatttaagccaagctgttcttcaagtgctgcaatcgcttgcggcgttgcttgttcccctaaaatcgtttgcgctgggttcccaggaatgagctggataatcgaaaatgtcacaagcgtcatgccaaagagaaccggtataagcaaaagaacccggcgaatcgcgtacgccaacatcggcttcacctcattttattgaataaagacaggcagcaggaaattgtctgctgcctgcagtaggctagtttgaaatttctacatgtttcaagctctcgcttgttgacggatgcggaacatagccggaaatggtgtcgacgccagcgagcgcaggaatggcatggacaagaggcaccattggcgcttcctcatgaatgatcaattgcgcttcttcgtacaatgccgcccgttcgtctggatcaatcgtcgtctttgcttctgctaacaaggcatcgacttcttcgttgctaaaaaacatttggttgctgccaggaatgccgtctgtagacaataagctgccaaggaagtaatcagggtcgccattgacgccagaccagccaagcatgaacatatcttgatagccaagctcgatttcctccaagtacgttgcccattcttttgtgacgatattagcagtaatgtttaattcactcagggcatcttggatcaccaccgctgcttgttcaggatcaggcatgtaagggcggctcaccggcatcgtccacaagtcaaattcaaatccatcgccataaccagcttcttcgagcaattcttttgctttatccatatcgtattcataggcgacaacgtcatcattgtgcccaaggtagtcttttggtacagcattggcagccggctccgccaatccaccgtaaatattattaataatttcgtctttatcaatggcgtggttaatagcctggcgcacgcggacatcattaaatggctccttttctatgttgaagcctagatagccaacgttgtttggcgtccgctcaaacgttgttaatcctgcttgcccttcaatcatggcggcatcatcaggggcaaggccatccattaaatcaatttcaccagattggagcgccgttaagcgcgctgagttatcagggatcacttggaaagtgacgccatctagttttggcaagccctcctgccagtaatcttcatttttttcgaggacaatgcttgcgtcttttgtccaactgacaaatttgaacggccctgtaccaactggattttcatcaatatcagcgccatattcttcaagggctgctggagatgttatcgcaaaataactcatccccatgttttgtaaaaatgaaccaaggggtttggacaggacaaactcgacttcataatcatcaatcacattaatttcctcaatcacatggccatcatcgcctttaaaaccgccgaactgggtgccatatacactgtaactgtacccttcatcggtaaaggcatattcatgatccgggtctgcccagcgctcaaaatttgttttcactgcatcggcattaaatggcgtgccatcgtgaaatgtaacaccttcttgtaaataaaacacataacggagcccttcgtcatcaacatcccaatctttagcaagccctggctccaattcaaatgaatcatcggcaaattcaatcaacgtttcataaatttgtttggtcacacgagacgattccccgtctgtaaccgaagcataatcaaggctttgcgagtcgccgccacgggcaaaaataagcgtgcctccgctgctgctttcttcaccgccgttgttgttttgttcgccatttccatctgtgcttgtttcatcgcctccgcatgcaccaaggacaaagacggctaacaacgccgcagagaaaagaggcatttttgcttttttcatttgatcatctccttttcggtggtttcattatacaaatggcacgctgtaaactgcccattgccgacgtcacgccaaacaggcgtttttattttgcatatgtccatacacgaggggcagcgcgtgtggaacgtacagccactcggtggatttgacgggcttggcacatcgccagtaagaacaatccgttcattcgtaatatctgggtcaggaacgggaacggctgacaataatgcttttgtatacggatgcttcggacgctcatataacgtgtctttgtccgccaattcgacaagccggccaaggtacatcacaccgacacggtcactgatatgcttgaccacgcttaaatcatgggcaataaacaaatatgtaagcttaaattcgtcttttaatcgttccattaaatttaaaatttgtgactgcaccgaaacgtctaatgcggaaaccggctcatcgcaaatcacaagttttgggtttaccgccagtgccctagcaatcccaatccgttggcgctggccgccgctaaactgatgaggataacgctttgcatgttctggacgcaagcctaccgtttctaatagctctgcgactttctgttttcgttcttccttcgtgccaatgccatgcacgtttaaaggctcgctaatgattttttcaattgtgtgccgtggattcagggaagcatatggatcttggaaaatcatttgcatatcccggcgcaattttcgtacttcttcagcggacaaagctgtcactttttgaccgttaaaaacgacttccccttccgtcggctcgatcaagcgcaaaatcgactttcccgtcgttgacttaccgcagcctgattcgccaacaattcctaaaatttcgccttccttgaccgaaaatgtcacaccatctactgctttcacttctccgatttttctggaaaatacgccgccattaatggaaaaatacgtttttaactgctttacttccaaaatcggcttagccggcatcttcgttgcctccttcatatagcaaacaacggcaagcatggccgtcctctagctcaagaagcgctggatttttctgaaaacaggcctcaaaagcaaattcgcagcgttcagcaaaacggcaaccttgttcaattgctcctggctgtgggacagtgcctggaatcgagtacaattgctgttttcgttctgtaagctttggcaacgaacggataagtccctgtgtatacggatgtttcggctgttttaagatcgtccgcacagtgccttcttccacaacttgtcccgcatacatgacaacgactcggtggcaaatgtcggcaacaacgcctaagtcatgggtaatgagcaaaatcgccatgcccttttgttcattaagagatttcattaaatcaagaatttgcgcttgtatcgtgacatcgagcgctgttgtcggttcatctgcaatgagcacttctggatcgcaagacattgccattgcaatcataatccgctgccgcatcccgcctgaaagctggtggggatactcatgaatgatttcctccgctcgcggtatgccgacatcgcgtactagttggatcgctttggcccgggcttcttttttgctgattttgttatggttgcgaattgcctcaatcagttggtttccgattgtaaacagagggttaagggacgtcatcggctcttggaaaatcattgagatttcttttcctcttaaccgtttcattcgcttggcctttgcctttgcaatgtcttcgcctttatagaggatttcgccaccggcaatttttccaggcggacttggaattaactgcataatcgacagcgacgttacgcttttgccgcagccagattcaccgacaatccctaacacttccccttttcggacatgaaggctgacgccatctactgcaggaacggctgttttgccagactggaacgttgtctgcaaatttttaagctctaacaccacttgttccatcggcaccctcctttttcaaaagtatcgaaatatatcttttaagatacataagtttttataataaagcaataaatttttacacttttattattatttttccttcatttttaattctctatgttatgttttctaacaaggcgcgttcgttttctcacttacaaacccttcctgtcttaattagttgcatgtttcgattttccttctatgaatttcccttcctttctcgttcaaaaaaacaacgggctaaaaacgagcccgttgtttttcctgtacatctttattctgttcttactcggtttctgcttcactgtctgtctcttgttcagtgctgttttggttttctggttctccacctgtttgcgtttcatcgagttcaaattcttccacttcgccaaattcgtcatcaacagttgcattcgtaaattcaatcacttgcaatacattttcttctgtatcgaccacaagtgcttcaatctcatcgcctggctcaataaataccgcattagcgctagtggtgacgtcaaattcaagcacacggctctccccttctagcaacacttgcaaaaagcggctattaaatgtatcgcttacccggtataccttaccagaaacggtttcttgctcgtataaatcggtcgggatatagtcatcatctgccaaatcagtcgccagcatttgccgataattatgaaaggcttcttcacgggatgcgcctcttgccacactggaagaatcggcgtgtaccatcgcgatttcacgcattaagccactttggtcgacaactggaacgacccacgtgtaattgtcataaaccgagtaaaggacaggttgtgttccttcccattgttcacgttggtaggaacggttgaccgcatccagagcgccacgggcattggtcattcctgaatttcctgtataataggttgcttcccctgtttgcgcatttaccattgtaaagccaaccatcgcatttgaatcttgattgggccgcatatggtcaatcatccagtacatatcgccatcggcccctaatacgccgatcatttcctcgtcacttgtcggctggtggacgccttccttcgcaaacaaggcgttgattaagccgttgctgtaagtaccaaaccagttcgcataatcgagggcgatgctataatcaatcgcattgtcgacaaactcaggctgttcccctaatcgatactgctccatttcccccgtcactgcatcgactagtatcacaccgtctgctttcggtgctgtgcggtagtgtttgtaataagcatatgaataggcgtaatacgggttgccatcatcgtctggttcaaacgaatagccaagtaaaatgatatcaccatatgctttgcggacatggcggtcaagattctcaccaaaaaaggcactcggcacatatttcatttcatagtcatcaacaagctgtgcttccgcattcggattttcagcactaaccatgacatagcctggtgcatggtcagctcgcagccaccgccaaatactcgaatattcaatcggcgatacccagaacagttcgtcattgattttctggatgctcgtttcccctaattcataaaacgagtaattgtcaatgttgccaaagacgatttccgatttgtaacgcgcgtatgtataaggcacggaacgaaccccgtcttctgtcaccgattcaatttgctcttcactcacctcaaattcaccaagctgtgcgagttcttttgttacggtcaatggatacacataattcatcgctaacaaaccaagcaaaagcaaaacgccaatgccgctttcctttccgacagaaaaacttggtttctttaactttttcaccttactgcctgattttttgcttggttgcggaacgaaatgaacgagcccggaaacaattaaattgattgcgacaacaaaaccaaacgtatttaataggccagtgacactaacgtcaattaaccatacataaataaatagaaagctaagtacaagtccaaataaataacgggctccttgtgcatacaaccatgatttcggtctctcttttaagcgactggcccatgtaaatacatttaaattgacacatgtgaacgccataatcaaaatccaactgagcatatctttctccccctctctctccatttatacgcatgctggcgctaaaaagtttcataccgcccctttaagtgagtagtgagtttaattgctctggatcccacttagtcaccgtcccttgatgaaacaccatcttccactttccttgcttattttgccatatcgaactgcgaagcgtcctcctgccgctatttttgttaatgatgaaataagtggcaagtgccgtatccaccgcaagcatccgaacttgaaaatgggacaatttccaatgaggaactgttttttgattttctgcaaatacatcctctttgtggatcactgtaccggaactgccaaattcaaaaaaatcatcatccaaaagctcactaaggcggtcgagcgatgtccgcacttctgcagtaagcaacgcttcttcttggcttttcaacaacttcgttagctcttccattgtatcccccttatttgagtcttttttctgcccattcctctcgtaaaatcgcatacaagtactcatcccaccaaccgcctgaccgagtaggaatgcattgccggcaaaatccttctttacgcataccaatggtctccattaacttccaagaggcgatgttttccggctggcacgtggctacaatgcgatggagaccgatgttagagaatccctcctctatacaagcttgtgcagcttctgtcgcaaagcctctcctttgccattttggatcgaatacccaaccaatctcatacgtatggccgccaaagtaatcaaaaaaatcaatatgcccaattaaagaatcgctgtgtttttcgatcacagcaaaagcctttgcattattaccgctattcgttctcacaaatgcttttgctccttgtttgtctaatgctccacctggtatatagtgcatgaccgccgtttgcctagcatagtcatacaatcggctccaatcgctttcttgaaaaggtcttatgaatagacggttcgtttctaactccatggtcttcctccctttcatccttatttcctcgttttcttgacagaaatacaaatagcctttacgatataattcggactaaattaataagattagaaggtgattttgttgtctgtaatcgcatcatcgcaaccacaccgagacatccaacagaacaaagcacccgctttaaaccgcccgcaaaaccggcttgtcattggcggccttgtggtcgcggcagcgttaacactatttttggcttttacacaagatattgtccaaccgctgctccttgtcatcggtttagggcttgggtatacattattccatgctcgtttcggctttacatcggcttttcgacgcctagcctctgtcggcaacggccaagcgatccgtgcccatatggtcatgcttgctgttgcttgttctttatttgcgccgattctcgcaataggcacaacattttttggcgctgaagccacaggcaacgtctcgcctgttggcgtcagtttgattgtcggcgcctttttgttcggcatcggcatgcagcttggcggcggctgtgcctcagggactttgtatgcagttggcggcggccgttctgttatgtttattacgctattattctttatcatcggttcaacaattggcgctgcacactttagcttttggatgaacgatatgccagccgcagaaccgttttcccttgctacgtcgacgaaccttggctacggcggtgcttggctcgtatcgttgttgatttttggggccgccatcctgttgtcgctctggattgagaaaaaacgcaacccgccgaaaatggctgctttgccgtcagcaagtgggtggaaacggattttccgcggttcgtggccacttatggccgctgcagttgccttggcagtgcttaatgcgcttactcttcttacgcgcggttcgccatggggtgtaacgtcagctttcacgctctggggctcaaaagcagcagacgcgcttggatttaatgtagaaagttggggttactggcaaggcaacattgacgcgctccatgcgtccattttcgccgatacgacaaccgtattgaactttggcgtcattttaggagcctttattgcgtctgccgcaggtggcttattcaaattctcaaacattaccgccaaaaatgccgcagcatccgtgattggcggattgcttatgggctacggcgcacgccttgcttttggctgtaacgtcggcgcttattttagcggcattgcttcctttagtgcccatggctatatttggggggtaatggcacttggtggtacctttttggctctctatttacggcctctttttggcctttccgtaccaaaaccgaaagacacattttgttaaaccgaaccggcttgggaatcttctccagccggtttttttgtgcgctgacgccttcaattgaggttattgtagcatagtggcagatgggcgaaaaaaattttcctaaaaaaacaaaaaagtttggcgctgtaatggactaaatcgccaaactgttgtatggtgtttattatagaaattttcattcgatataatggcataatcgttcttattttaaggagtaggaggacaccccatgagaaaacatcttttatttacggttgcacttacatctatagctggccttcttgttgcttgcggaagcacagagcaatcaggcgaagcggaaggagaacgtgttgaaattggcattgtccagtacgctgaccatccttcattggaccaagcaacagaagggttccgcgcagcgcttgaggactcagcgctcaacgtaacatttgacgaaaacaacgcaaacggagatgccaatacgttgcaaacgatcgctgacaagcttattggcaatgaagttgaccttgtatttgccaatgctacaccagcagcacagattatggcctcatcgataacggaagtccctattctgtttacctctgttacggacccagtaggggctcaacttgtcgattcattagaagagccagggggaaatgtatcaggcacggttgacttccatccagaagcgattgaaaaatcgatcgcattaatggatgaagagtttgacctcgaacggattggcatggtctataacgctggcgagcaaaactcgcaacaccaagtgaaccttgccaaagaagctgctgaagctaggggaatgtccattgttgaggcaacggtgcaaacatctgctgacgtgcaaacggcgacagaaagcttaattggcgacatcgacgccctttatatcattacagataatgatgttgttgctggattggatgctgtcatcggcgtcgcggaaagagagcaattgccattatttgtaggtgaaatggactctgtcgaagcaggagggcttgctggttttggcttttcttattacgacattggctacaaagcaggagaaatggccgttgagattttaaatgatggagccgatgtaagcacgatgtccgttgagctgccgccagaactcaatttagtgtttaaccgcggtgcggcggaacgaatgggaattgaatggcaagacgattgggaagagcttgctgatgatgtcatcgatgagtaacacgaaggaagtgaaaaccggatgtttaccgctgtttttggagctgtagagctcggcttaatttatggaatcatggcgctcggcgtctacttgtcattccggattctcgattttcctgatttgaccgttgacggcagctacgtaacaggtgctgccgttgctgcgattatgatcacaagcggctactcgccattgcttgctacgttttgcgcccttgttgtcggctttatcgccggttgcttaacaggaacgcttcatacaaaaggaaaaatcaatccccttttatccggaattttaatgatgattgctttatattcgattaacttgcggattatgggcaacagcccaaacatctcgctgatgcgtgaggattcattgctgactgtttttacagactggtgggcaggattgccgattgacaacgcggttaatggcgccttaacttcgattgggctaggcggatttactccatcaagctggtcaatccttgtgttcgtcattgtcctcgtcttagcagtcaagcttgtcattgacttctttttaaaaacggagtcaggccttgccttgcgtgcaactggcgacaacccgaaaatgatccgcagcttatcagctaatacagaccgccttaaaatcatcggcctcggcatgtccaatgccttcgttgcactagccggtgcaaccgcggcccagtatacaaaatttgctgacgtcaacatgggcattgggatgattattatcgggcttgcttctgtcattattggtgaagccctgtttggcaaaggatcgctcgttaagattacatttgccgtcattattggcgctgttgtctaccgcatcattattgcactggcgcttcgcgttgagtttttagaagcaggcgatttgcggttaatcacagcagtgatcgtcatttgcgcccttgttgtaccaatgctgatcgagcagtcacgcaacaaaagccgcaaagcaaaacggcttaaagcgattcagcaagaaagaaaggaggccagcagccttgcttcgcctaaatgatgtttataaagtctttaacgaaggctctgttgatgaaaaaatggcgctccagtcaatcaatctcacactggaagaaggcgactttgttactgtgatcggcagcaacggcgccggcaaatcaacattgatgaatttaattgctggccacctggcgcctgatgtcggcacgattgacattaacggaaacaatgtcaccaatctccctgaacacgaacgggctaaactaattggccgtgtgttccaggacccgcaagcaggcacagctccttcgatgacgattgaggaaaacatggcaatggcgtacagccgcgccaaaaggcgatcgttttttcggatcggggtaaccaaaaacaggcgcgctcttttcaaggaacaacttgcctcgctaggcatgggcttagaagaccgtttaacggctaaagtcggatttctgtcaggtggggaacggcaagcgttgtcgcttttgatggcgacttttacaaacccgtcaattttattgctagatgaacatacagctgcactcgatccatcccgggccgaactgattacagataaaacacgggaaattgttagcaaaaccaaattaacaacactgatggtcacccataatatgcagcaagcattggatcttggcaatcggttgattatgatggacaaaggacaggttatttttgaggcaacagcagccgaaaagcggaaactgaccgtcgaaaagctgctaagtgaattccaaaaaattcgcggcggccaatttgccgatgatcgggccgttttaagttgaggcaacgctttatgtctggataatggcggctatgtggctccattaatcggaaacgttacagtccaagggcattcactaacaaacataagtgaatgcccttcatgtttagaatgcaggctgatgttgcctgctaggagaagtcactccaaggttcaactctgtttcaaactcaaccccgggagtacgaacggctaagtcataccttggcttctttgtttcatctgtaaaaaaaccacagccaatggcgtctcctttagctagaaatactggattatttagcaaaaaatgttttatagcaggggattcgatatttgcacttaacaacacccgcttgtccgcgaaagcagcaggcggccatttcaccgttgtagcaaagcgctttttatactggaccgttcctttcgacaaaaacggttcaccgccttggaagtcgacctcatcgatgtctgactctccacatgcccattccagcaaaaagtcataaacggcagcttgcgcgccactttggcgatgccgtgcctctccgccagctacccctatcaaccttgcgtctaaacggcgatgtgctttgtttattgcgcacaaaccaccgctaacggcaagcccgttttctttaacaagaaacagctttccgctcttaaataatttttcaaaggcagtatccaccggttcactgatcgcgctgtccccatggcgattatcgattgtcggcttgtgcatattataataaaacgcaaaaaaatcactttctttttctgctacctcatacacaaacctgccttcatttttgcggcgccgtttcctttcttgtttggccatcgattggaccagttcagaaaacggtcgccttgtgtcaaccgcttggtggatacggaatggcaaagtccatacgccatctggcaccgctcttttttcggcctcgcccttgccaacaatttccaatcgcaaatcgccttccttttcaattttgcattctgtttctgttactggctcgttgccaaaaaggcgttgtttgacaaacgggaacagccagtgcttgtcttccgttgcgccgataaactggagggagatttcttcgccatttacattgccgaacgcctcggttccatatggcattagcagcacctctattccaatttttacatttgcctttattgtaccatttcttctcaatttttacatccatcgatatttgataaacgttaacattcaaaaaagcaatcctattcatcagattgcttttttgaatgagaactaaatggtataatcgcttacttggaagacgcctagtttttctggtcgaatgtacgctttatcaccgatagaaagccccaattgcgcaaaagtttttttaggttgctgaatctcaatcgtatcgccttctccagcccattttgcttcaataaatacaatgggccctacaggatggacggaaacaatatcaacttgcaaatccccttcgccttcatacgttttggaaacagcgatttcatgggggcgagcatagccaacgactggtccatttgtcgtagcatcgattgcagcaagctcccacttggcaccggcaacggctaatttcccagattggctaacgcctttaaacggataggcattgcctagaaattcgtaaacgaatgggctgtttggctcctcatatacttccgttggcgtgccagcctgttcaatctcgcctttattcatcacgacaattttatctgcaacatctagcgcttcttcttggtcgtgtgtaacaaacacagtcgtaatccctgtttctttgtgcaacgtccttagccagcgccttagttctttccgcacttgggcatcaagggcgccaaatggctcatcaagcaacagcacttcaggcttaatcgccagcgcccgggcaagggcgactcgttggcgttggccgccagaaagctctgatgggcggcgcttttcaagtccttctagcttgacaagcgccagcagctgttcgacaatgcttttaatctctgctttgcttggccgttccgatcgttttaaaacattcaagccataagcaatgttctgctcaaccgtcatatgggcaaataatgcatagtgttggaacacgaatcccacttttcgttttcttggattaacgtttgtgacatgttttccattgatccaaacttctccagagtcaactgcttcaaggccagcgatcattcgcaaaagcgttgttttccccgatcccgagggtccgagcaaagcaagcaactcaccttgctctacccgtaaatctacttgctttaaaacatgggtgttcccaaagcgtttgtcaattttgttcagtaagatcgtcatagctcctccttttttgccgccactctacccattgtttaacgccaattgtaacgagcgcaaatagcgacatgagcgccgctactgcaaaagaagcagtaaattggtattcattgtacaaaatttcaatatgtaaaggcattgtatttgtttgtccccgaatgcgcccagacacaactgatacagcaccaaattcgcctatcgccctggcactgcatagaatgacgccgtataaaagcccccatttaatcgcgggaagcgtgacatgccaaaatgtccgccatccgcctgccccaagtgtgagcgaagcttcttccgcttcagaaccttgtgcttccattaacggaatgagttcccttgcaataaaaggcaatgtcacaaacatcgtggccagcacaatgcctgggacggcgaaaatgatttggaaaccttgtgcttgaagccattcgccaaaaaagccgtgaacaccatataacaaaataaacactagacccgcaataacgggtgacacagcaaaaggaacttcaattaaggtgatgagcaactgccttcctcgaaaacggaattttgtcaatagccacgctgccgacaagccaaacaacagttgcaacggcacggtaattacggtcacaagcagcgtaagctgaatcgctgaacgtgcagcaggctcattaatcgctgccaaaaacactgttagcccttgtgaaaacgcccctgcaaaaatgacgataagcgggagcaataaaaaagcacctaaaaacaaaaaagcgacaatgattaataggaattgactccacgttttgcggctgtttattttttacgcccccttttgccctaatcgttttgacaatagccactgcaagccattggtaagcagcaacagcaagaatgacacgactagcataacgaccgcaatcgcggtagcgcccccgtagtcaaattgctcaagcttcgtcataatcaaaagcggcactatttctgtttgcatcggcatattcccagcaataaacacaactgaaccgtattcacctagcgccctggcaaaggcaagcgccataccggctaatagtgccggggccaacaccggaaaaatgactgttaaaaatgtttttactggcgttgctcctaaaagagcggacgcttcttctacttccttgtcgaggtttttaagcacaggttcaaccatccggacaacaaatggcaagccaataaaagttaacgcgatcgtgacgccaatcggcgtaaaggcaacctctatgcctaaaggcgcaagcaatgacccaatccagccattttccgtatagaggcttgttaaggcgatgcccgctacggctgtcggtaaagcaaacggcaaatcgatcatgccatccatcaatcgtttcccgaaaaacgagtagcgtgccatcacccatgccactaatagcccaaacacgccattgatgaatgccgccatcaaggcagccgagaagcttaatcgaaatgcggcgaacacgcgggggtcatttacggcattccaaaacgtttcccagccgttgtggacagtaaacaacagcaatgcagctaatggaatgagcaccacaaagctcaaatagagcattgtaaatccaaagcttaagccaaatcccggcaatatccgtttcatagcaaactcctatcgtctgtttttctagttgttccatgctgcttatggaacatcaaggcggcaacgctcaccttaattgggctggtatatctggtcaaatataccgccgtcagcaaaatgtttgtcctgcgcctcttgccagccgccaaatttatcgtcaattgtaaatagctctacttccgggaacacatcgcgatgttcctctaaaactgcttcattccgtggccggtaataatggtcggcgatcaactcctgcccttcatcgctgtaaaggaattgcaaataggcttccgctacttctctcgtccctttttggtcgacgactttatcgacaatggcaacaggaggttccgttaaaatcgacatcgacggtgtcacaatatcaaactcagaatcgccaagctcatttgcggcaagaatcgcttcattttcccatgccaacaaaacatcgccaatgccccgttccacaaaagaagtcgtagcgcccctagcgcctgaatctaatgcagttacattttggtacaagtctccaacaaattgttgcgctgcttcctctgaaccataagtttcttctgcgtaaccccaagccgctaaatagttccatcgtgccccgcctgacgttttcggatttggcgtcaccacttccacatcatcgcgaatgaggtcatcccaatcttcaatttgttttgggttccctttgcggacaagaaaattaatcgtcgacgtataaggagaagattgatcggcaaattgctgctgccaatttggatcaagcagctcccgttcttgcaaaatatcaatatcataagcaagggctaatgtaacgacatctgcctccaagccgtcgagaacggagcgcgcttggctgcctgaaccaccgtgggaagtgttaatagctacgtgctcaccggttttttccaaccaatggtcagcaaatgccttgtttacgtctgcatataattctctagttgggtcgtaagatacgtttaaaatctcaactgaattcccctcccctgatgtttcttcacctgaaggagcacaagccgcaagcagcactcctacagtcgcgacagacacaccatatccctttttcatagaatacacccctttaatccgatttaatgcattaaaaatagataattacttggtttttgagcgaaaagaagaaaccgctatagacggattcgttaaaagaactgactctatattattctcactattccgacctgtcaataggtttttcgttcttttcttgacaaacaacagtgctctttaggaatgtatacagcttgaattcgttccatgccccccttgctgaactggcgttaacgtcgaaagaacagtctgcttctcttttgacgattgcgtttttttccaccattggggatgttccctctttttctggacagctgtttcctgtaaaatgtaaaaagaagcatgaaccctactattgaggtgtgagatgaaacaaactaaaacgaatgcgattcgcttgttagaacaacataagaaaccttataccttgttttcctatccggtttcagatggcaagattgatggccaatcggtcgcgcaaaagatcaataaaccggaacacgttgtttataaaactcttgttgcccaaggaaaaagcggtgctatttacgttgcgctcattcctgtgaacgaagagcttcatttaaaaaagctgcaaaaagtgactgcggagaaaaaagttaacatgctcttggcgaaacagctccatgatgtgaccaattatgtccgtggcgggtgttcgccaatcggcatgaagaagccatacccgacttttatcgattcccaagcagcacagctagatgccattgtcgtaaacgccggaaaagttggcttgcagatggaacttcggttaagtgatttggtcgaagccgccaacgctcagtttgcagatctaacaatctagctactctgtcttgtgattagaatcgcgatttaaagcagccttgagatgttacgttgccttcagggatgcgggaagactactacggccggaggctcttatgaaacagagaacgaaaattttattgctctatttattttgtagcttagtatgggtagtggggtctgacctcgtgcttcttgctttcgaccaagaagtcatgccgcttttccaaggaatgaaaggcatcgtgtttgtccttgtctctagtgtatttatttatctcttaatcagcaaaaccgaaaagctacaggagtcggaagaggaaaaggaaaaaatcgatacattgattaactcaatggttgactttgttaactttaaggacggcgaaggacgttggattcaaaccaatgactatggccttaaactttaccagcttgaaaatgtggactaccgtggaaagaaagattcagaacttgcggcttatagcaaggcaagccgcgagccgttgctttattgcgagcacacggacaacttaacgtgggaaagaggagaaacgacaagaaccgaagaagtttttccgatgaaagatggaacaaaaaagacgtttgatacaattaaaacgcccatttatgatgaaaacgggaaacgaaaagggcttgttgtcattggccgtgatataacagaacggaaaaaagcagagaaacaacttgcagaaagcgagctgcgttacaaagctttattcgaccataatcctgagctagtgtacagaattgatttgcacgggaacattgtggatttaaatgataaatttatgcaagtaactggttacaatcaagaggacgcacttggcaaatcaattctcacttacgtccagccagatgaccacgagcggttgcgctggaaattagagcaagtcaaattgacacggaaagcacaccaatgcaaccaagtccggattaaccaccgctatggcgaccgtgtcattgtcaactgtgcatcggttccgatcatcatcgataatgaattggttggcattacaggttacgccaccaatattacaaaaataatagaaacagaagaaaagcttcgtacgacggaaaagttggcagtcgttggcgaattagcagctgggatagcacacgaaatccgcaacccactaacatcccttagaggatttgtccaacttttccaggatgaaagcaaggaaaataacccccttcatcggattatgctcgatgaattagaacgcattaatacgattgcgagcgaattgctcgttttgtcgcgcccccaagaagtcgcctttcaaagatgcaacctccggcaagtcttaggggacgtcattcagttaatggggacaaattcacagcttaatggggcgactctgtctcttcaagcagaagaagggctatctcttgagtgcgaccctaaccagttaaaacagctgtttattaatgtcgtgaaaaatgcggcagagtcaggagcgagcgccattgttgtaagagcattccctagcggcacgcaaatctgcgtggctgtggaagacaatggctgcggcatcagtgccgaccggattgaaagactcggcgaacctttttattcgcaaaaagaacgaggaacagggcttgggctaacgatcagccataaaattgttgaggcccaccatggcgcgattcagtataagagtgagctaggaaccggtacaacggttttcattgctttgccgaaagtacaataaagcaattctgaagaaaacatagattggaaacaccgcataaagctgctcttcgtctagcagcatcactcagtggcctgccgataacagcaggtttttttatctatacagggccaccgtaacgtgatataatctgccattattggacgaatcgttttagctttcaaacgtcgcaacattcgaacagaaaagggggatgatgcatgtctgagttggccgaggcattgcaagcccatttagggactcaaaaagtgacaatcaatgaaacggcccttgcgcttcatagcaaggacgaatcctaccatacgccaagcaaacctgaagtggtcgcatatcccacatgcactgaagatgtgcaagccattatacaaatagctcaatcattttccgcgcctatctattcatttggcctcggcacaagtttagaaggccatgcgataccgtacgaaggcggcgtctcaatcgatttttcagaaatgaataacatcatcgctgtcaaagaaaaagatttccttgtaacggttcagccaggggtaacccgttctcaactcaaccaggaattaaagaaatatggactgttttttccagtcgatcctggcgcaaacgcgacacttggcggcatggctgccaccaatgccagcggcacaacttctgtgcggtacggcattatgcgggatcaagtccgtgacttggaagtcgttttagctgacggtacgattatccgaactggcaatcttgcagccaagtcatcctcaggctaccatttaaacggattgtttgtaggatcagagggcactcttggctgctttacagaattgacgttacgtgtccacggcattcctgaacatattgtagctgggcgcgcggcctttcggacgttagacgatgcagtagccgccgttgtcgcgattttacaagccggcattccgattgcccgcgtcgagttagtagatgaaccttccattgctaaagtcaatgcctttagcgatactgcttatagccaaaagcctacactttttcttgaatttcatggcaatgaagcaggactcaaacaagacgtggcctttacaaaagaaatggtggccgactacggttgcgaagcctttgcttttgaaaccgatacagcagcccgcaataagctatgggaagcgcggcacaacttggcatatgcttacgtgcacagcgcccctggacgaaagctgatggtgacagacgtatgtgtccccatttcacaactggcagacgcgattcgcacagctcgaaacgcggtcactcgctctccttttgaaggaggcatcattggccatgttggcgatggcaattaccacgttttgataatgattgacccagctaatgctgatgagatcgaagcggctaaccgcttaaatgaagcgattgtcaatgacgcacttgcgcgcggtggcacgtgcacaggcgagcatggcgtaggcataggcaaactgaagtaccaagtacaagaacatgggcctgcgcttggtgtgatgcaatcgatcaaacatgcccttgaccctgaaaaccgaatgaaccctaataaattgttgtacacaaagacggaggatgttgtatgaagtggattgaacggcttagttcttttgccggaaaatattttgcattgcttgttattgcagcggctatcaccgcttttcttgttccagaaatatttatcccaattaacgcgtatgtaccgattttgcttggcgtcgtcatgctcggaatgggaatgacgttaaagccagttgactttaaacttgttgccacacgcccactccctgttttgcttggccttgtggcccaattcacgatcatgccctttacggctttcatgattgcttatttgctgcaactgccgccagaactcgcggctggccttgtgctgcttggctccgtccctgggggcaccgcatctaatgtcatggtttatttagctaaaggcgatttgcccctttcaattacaatgacgtcaatgtcaacgttattggcgccaatcgctacaccggctttgctttatttgttagctggccaatggctgccagtcaatttcgtcgacatgtttacgatgattgttcaagtcattgtcattcccgttatcgccggattattgattaaccgtttcttgccaaaagtcgcagcaaaaacatctgtggcgatgcctcttgtctctgtgcttgccattctcgcgatcttatcagcggtggttgccgccaacactggcagcttgatccaagcaggcttgattagctttgttgccgtgatgctccataatgccgccggcctcgcactaggctttatagcagctctcgctttccgtttgccggccagccagcgtcgtgcgatttcgattgaagtcggcatgcaaaattccggtcttggcgtcgccttggccactgcccattttacaccattggctgccataccaagtgtactcgccgctgcttggcacaacatttctggacctatccttgccacatactggtcaaaacggccactgccaccagaggccacatcaccactaaataaaaaaagagcttcttgacgaaaaacccgccgcatgttgcggcgggtttttccatgagttggctgcttaaggagaaacggcttttacccctattcctgtttgggcaagcatggaaaaataagaggggcatgttttggcaacgcagcctgggtcgtctagttcgattccatctacttttgcgccaatcagagcaagtgccatcgccatacggtggtcatcgtaagtgtttacaacagttggcttcggctggcctggataaaccgttaatccatcatgcctttcctcgacacggatacctaagcggcttaactctgtgcaaattgcgcgaatgcgatcacattcatggtgtcggatatggccaaccccttcgatggcaattggaccgtcagcaaaaggagagattgcggcaagcgttaaggcttgatcggataactcattcatgttaacggtaaatccaccccttaaacgagtaggtccttctccttcaacaaacgatggtccgatttcaaagttgcatcccattcgtttcaggatagagacaaacagaatatctggctggcttgttttcgtcgaaaaatggcgtatacggattttccctgctgtgattgcggcaagggcaagaaagtaacaagctgttgaggcatccgcttcaatcgcgatgtcgtttgcgacataaggggaagggttcacttcaagcaagctccaatcaggcgctgctttcacttcgaccccaaaagctgccatcaagtcgattgtgattcgcacatacgcctgttggacaatcccatctttaacagtgatcgagacagggtttttcgccaatggggccgccaataaacagccgctaataaattggctggacagctggccgctcatgttcacttttcccccgttcaacccttcaccagatatggaaaggggataatggcccctacggcttccatactgaatgtttgcccctaatgcctgtaatgtttttaccaaaggagcaatcgggcgtttgttcatgctgtgactcgcttccacatgccagtttcccgttgctgctgccaacattccaggcaaaaaacgtcctgctgttccagctgaaccaatataaagggagccagaatgaaacacccctcctctcccatagacagtcacattgcttccatctaccgcaatttctacccccgttttttttagcgcctcgatgcaccaatacgtgtcatcgctttttaacgcattccttaatgtagaagtgcctgacgcaactgctgctaacagcaatgcgcgatttgttgcacttttgcttccaggcacttctaacgtagcgtttattcttttttggctcggcgttaaacggaggcgttcgacgcctgctaaaggcgtccaagggctacgtgcttgtgaatcaaactgaaccatggtccaatctcctttgttttcgttcttccttttattttaatgacagaaatgatataaatgaaatcaatattattaatcgatgacataggtgatatttatgacaaatttagagcattaccgcattttttatacaacggccaaagaacaaaactttagcaaagccgcttcctctctatttattacacagcctagtgtcagccacgccattaaacaattggaaactcaactaggcgtgtcgctctttattcggcactcaaaaggggtctttttaaccactgaaggcaatgtgctttactcgtacatcaagcaagcatttgcccatattgaaacaggcgaacggcacctccaatcattgaaagcgcttgaaagtggatcaattaccattgctagcagcgactcgatttgcaaacattatttgttgccacgggttccctctttcttgaaacgttggccaaaacttgatattaagttccagcatggctcgacgccagacattatgaaaaaattagagcaagggcgaatcgacatagggattgtgcacttgcctattaacgagaaggacgtggaaataaccccttttacatcgactacttgcctcttttgtgctagtccaacatacaaaacgcttcataacggtacccattcattaacggagcttacccgctacccgcttgtctctttttcagcagggagcagcactcgctcttttcttgagcgtttattccaacaacaggggcaaacgttttctccagagttggaagtcgggagcattgaactgctaattgagtgcgccaagcttggcatgggaattggctttgttgctaaagagctgatcaaaaaggaacttgagcaaggcgagttagtcgaaatcccggttgatatagccatccctactagggaaatcgcgctcattacaaaaaaagcagcgccactgtcaatcgcagcgcgccgcttttatagccatttactagccaattaaattactcgactttttccgtatcacgtaaatagaaaatacttgctggatattgccagaacccttcaatgtcatcgcccatgccggccaataacacagagtggtacaaattgacgactggcgcttcctcggccaacacgttttgcgcttcttcataaagggccaaacgcttttgttcatccgtctctttacgcgcttgctctagcaaatcgtctaattgctcattggcaaagaacgttctgttgccaggggcgccaaagttggacgaatggaacatcgggtacaagccataatcggcatcgacagttacggttccccatgtgccgataaacatttccgtctcgccatcgccggtcatttccaaatacgtagcactctcaaccggattaacggaaacatgaatgccaatttcttcaagttgggcttgcaagtaggtagccaaatcaactaatgaggcagtgctgctgttgacagttaatgtcgcatcaaaaccgtcttcgtagcctgcttctgccagtagctgccgcgcttcttcttggtcgtattcgaacgtatcgatgttttggctgtaacctgtaacagtaggagcaagtggcccaatcgccggttcagcaacgccgtccaataagccgttaataatgctgtctttgtcaatcgccatattaatggcttggcgtactcgcttatccgtaaacggttcaacttcagtgttaaagcctagataagtcaagttcgagctcggggactgtttcacagtcgtgttttcggcagactcaatttccgaaatgctgctcgggttaactgggtaaataatatccgctacatcgccttgcaactcagcaattcgcgtggcttcctctggaaccgttttaaaggtaatcccgcttgctttagcaagattgcccttgtcccagtaatcttcattccgggttacagagaccgattcgcctgatgtacggctgtccaattcaaaaaaaccagtgccgatcggatgtgcatctacgtatgaaaaagcaggttcgccgttttcgattgcttcataatcagcgtcaatcgcttctttgctaatcattccaccagctgggtgagctaaatgggacggaagcggcgaaaatgggccgtctgtatggatatgaaccgtgtactcatcgatgacttcaacatcggtgattttatcaaacaaaaacgcaacaggggaacctagatccgggtcgcgaacacggtccaagttggctttaacgacttcagcattaaatgcactgccgtcgtggaatgtcacgtcttcacgcaactttgcttcccagacatcatcttctatttgttcaaggcttgtcgccaagcttggttgaatctcattgttttcatcaaactcaaccaacttattataaagagttcccattacatataatgaattcccatcatttgccccatgggggtcgagagaaacaggatcagacgacaaatcaatcgttagctcggccccgcttgcgctgttttccgcctcatcgcttgtattttctgcttgttcaggctcgtttgagcatgcagtcacgacaagcatggcagaagctgcaaccgctaaccataaagcgtttttcttaaacatgatgtcacctcttttgttgtttcccctattatacttaatctcccataagattactagactttttataaaagggtttggtgaagtccatcatttctcgcctcgccaacaatatcaacgtgctgttagcgccctggccagactgtagacaaacgctcgcatccttcgctgccacctgttcatctgctcatgaacccacgttcaatctgcacgatcacgcttcggccgacaagcgttttctatcagtctgggattttgtcgactatatcgacacttttgccccttgattatgaaattttacgtttaaaaatccaacggttgtaataaaacaggcttgctggaaaaccgcctagtttgattaattgttttgcttctgctttcaaacgaggatggctcataacttttttatctgataaatagagcgcgtacagtcctgttttcaacagcaagtggaattttttatcaggaagcatttgcagcttttctgtcgccttctcatcaatgtatttaaaacgctcgaacatctctttgctgtctccataataagcgacaaaattcatttcgttttcttggcggtcttcttcttgatcaataaaataatcgagcagaatatggacgccttgtacccaaggaaaataggcctcttttatttgctggccttgagcagtctgtacaggggcagcggcataagcagccatacagtataatgcaagggtcgaggctgttccgcaagcaaattcataccagcgcatcgtcggtgcaaagtgtttgttgcgttcataaaaatcctttaataacggctcacgtttttcttcctcgacatgcttgtatacttgaaaatcaatataaaactgggatacttcctgcatatgcgtttgcatgtctgcaaatccaggaaaagtagcagtcgcttcccggcaagcatcgaccaatttccgcaaatacccgttgtcttcaaagtgatcacgatactgataataatcgccatggggtttgtccggcgtcaaacagtctaaaagtgcttggtggatggaacggaaatcatttggatcatgggcatcatttttgtcacaaagtgtatcaagataatcacaaatcgtttggtaggcaactaaaaattgaatatggttgtccttattttctcctgccagcaatgcaaaaatgctgccaccttcacagtgaaacgttttatcattgaccgtccaagcggcttgctctcggatatcaacatcgtcgattttcaatgcttcttgatgccatttctgcagctcggcatgcgcttttggcacggtttccttaaaagctaattgtataattttaaatgggttggcaggcactgtgcccatatgtattcctccttcaacaaggcaagaaagtccgctgctttaactttaccatatcaaaggaagcaattcctctcagaagcactcactctcatttaattgtcacgattagaaaagaaacgctttattgaaatgagcagatcatcaaaaaatatgagaaaggccaacccaaacgatatccaaatccatgaagcgctcccttcaaatgccaaagcgccaattaaaattagaatcatccctaaataaaaaccaatgtcttgttcgctgtcccatttcctactcggagtgggttccgctattagctcgctctcctttaataaataatcagtcgaaacgtcgaataattcacttaggcggacaatattttgaatgtctggcaaacctttgtctgtctcccatttccatacggcttgcctcgaaacgttcaattctttcgccaattgttcttgtgaaaacccttgttcttcacggagctgtttcagtttacttccaaaagaatgcatgtttgttcacctcaccccctatgatagcaaatctaacatcatcgtgtacgctacttgccgtttattaatgaccacgatcagttaaaaacctgtttacagccgttttacatagcggattatgctatgttcaaccccagtgtgatcacaaaacatcgttttcgacttattatgagcatttttctactttccaaacttcctattggatttgctcgctccttctgactacgctatactgtaaaaagacaaaaagcgaggtgaacgatgccagatagcctaagttgccttttctaatactattttttaataaaggagctgttaggcataataaactcattaaaaacaaaccgcctctaccttcgggaattggcagacaaagatgcccccgagctgttcaccatttggtcaacaccggcggtcacaaaatttatgaatatcattccgttaacggatgtcacacaagcagaagacatcattaagatgtttgcacagctaagcaaagaaaagaaaggaaaccgctattcgattttcctcgctgaaacaggcgatctgatcggcacttgcggctttaaccagcttgatgctgacaatgacagaggcgaaattggctatgaattaggggaaccttattggggccatggttatatgaaggaagcgctcatgaaattgttggaagtcggctttgcttcatttgcattaaatcggattgaagcaaaagtcgaaccggaaaacagcgcctcgattggcttgttagagaaaatcggctttcaaaatgaagggcttttgcgccagtatgaaaaggcaaaaggccggtatattgacctttatttgtttagtttattaaaggaagagtgggcttaagcccactctttgttttttcgttttcttgcgcttcgataatgataacagcctctaacgatgttgagtatacacaacccgccaaaaatgacagcgaatgagagcggattttccaacagaaaaagtgagccaacagcaacagccagacaaatcgctgcgcttagaaaataaacatgatgccgaaacattgtgcttcatccctttgcggacttttttgtgaaacgcccgtttacggacttcgacatagttgccaaggctcctctaattcgttgatcattttccttttctatcctttgatgcccgttagcgtaacaccttcaacaaaatatttttgccccagaaagaaaacaagaattgccggcaacgtcattgcagtagccgcagccataattaaattccagtctgatgtatacgtgccttggagctgcaaaaggccgagtgccaatgtaaacaatgattcgtcatttaagtaaatcaatgggccgaaaaagtcattccacacattcgtgaaagtgaaaaaggcaacaactagtagcgcaggcttgacaaggggcaggagcacgaaaacaaaaatttgcacgtaattggcgccatcgattaatgccgcttcgtctaattcccggggaatactcataaaaaattgcctcattaaaaagatgaagaagccgccaccgccgaaaaagcttgggaacacaagaggccaatacgtattaatggcgccaagctccgtccaaagcataaaagttggaattaatgtgacggcaggcggaagcatcatcgtggcaataataagtgtaaaccaaatatttttccctggaaattgaagacgtgcaaaaccaaaaccgcacatgcaacttgtcaacactgtcccgattaggacaggaatcaggataaacagtgtatttttcacgtacaaaccgaattcaacaacttcgaaaatttcaataaaattgccccatagccaatgatccggcaacattttcggcggaaattggaaaatttcagaagaggtcatgagcgcacttcggaccatccagaaaaatggcagcaacgacacagtcgctccgaaaagcaacaagcaataagcggcgattttccagccccgacttcgcattatttgccacctccgtaaaaaacccagcctttgccccatttaaaaatcaacaccgtgaacaacgagacaacaaggaacaaaatccacgctaacgcgcttgcataccccatattgctgtggacaaacgcttctcgataaattaaatacacataaaacaaactggcattattgggccctccttctgtcataatgtaggcttggttaaacgtttgaaatgcgccgatgagccccataatcaaattgaaaaagatgatcggcgaaatggcagggagtgtcacaaagcggaactgatgccacgcatttccgccatccaactcgactgcttccaattggtctttcgggatttcttggagaccagctagaaaaatgagggcagcgccgccgcagccccatatgcttagcaaaatcagcgatgggataaccgaggcctcgtcatagatccacatagaggcagggagcccaaagaagcggagaatgccattgagcaggccaaattctggattaaataaccacatccataaaatattcgctgccactgccggcacaagcacaggcaaataaaagagcgtccgccacagcccttgcccttttaccttcatgttcatcagcaaggcgatcaacaaggcagcaacgagtgtagcagcagtgctggcaaacgcaaagtacagcgtgacgataagcgcttgtttaaaataaagatcttccgtgaaaatggttatataattgtcgaaagcgatccaattgatggtttccgcgatcacttggtaatcggtgaagctcaaaaccaagctggcaatgatcgggccaatcgtccacacaagcaagcccaaaattgccggcagtgtaaacaggtagccagcaagatactcttttctcgcaaaccgggtcgcctttttccttgcccgtatcgacggtttcagcggttcaatgtccacatttgccccctccctactcatatttatcgccaaactggcgtttcatccttggcataatgtcttcatggacgacttcctctgctgttttgttgtttagccatagctggtctagggcaggtgaaatgatgtcgcctgctttttgccgatcatcccaaaaataattcgggttttggacaacatagtctttagcccagtcgatcactgcctcttcgtattcaggtggatgaatcggcgtgtcgatccaacgctctattttttcacgatcctcataccaggctgtttcgtttggcatccacagcccttcattaataagcattaacacattttccggatccatgatgtatgttaaaaacgtatcgactgcttgcctatgctcgccttccttccctgtctcaaaggccacaattggcgtgccgtaattggtcgttgctggttgttcaaaatacggcagcacgccgatgccaaaatccaaaccgtcttcgacactcgcccggccaagttcttgcatcgcccattggccatcaacggccatagcgacacgctttgttaaaagcgccgtgtctgtcgctggaacggttgataaatccgacggctttggcataacatgatgcacatacattaaatcggcaacgtgctgcaacacttcaattgattcaggttgatcgatcatcaactgtttgcctgtttcatcaacaaaaccgccgccgttgctgaataagaacgagtcgatccaccccgtaaaattgctgacgccgtatgtttcaatccggttctcatcaaagccaggctcattcgccctccgtccgttccggtctacagtgagccttttggcaacctcaacaaattcatcccagctccatgcctcttctgcctttgttggcggcaattctactcccgcttctgcaaacaattgtttgttgtaataaatgtttatcacttcattcgcaacgctgcccccagcaatcggcccatcatgaaactgatatagcgtataatcgagcttttcgtttgcttcgtttcctgtcaacaacggtgtcaaatcccgaagcatgccgttttccacccacgggtacaagctgccttctggaaaatagccaacgtcgggaagtgttttcgatgcagccatcacattcattttctccacatagctattaatcgggacaagctgtgccctcacttgaatccctggatgctcgttattaaatgtggaaattaatgtttcaactgcttcccgctctagcggcccaccccagtaggtaaaacgcagctctactgggtcattggtgccgacagaagcaaacaggcagccggaacaactaaaggcggctagaagcgtgacaacatgacaggcgtcctttaaccgacctttcattggcctttcctcctttttaaaagctatctatgacgcagccaaacagccatctcgccttcgccgcggttggcccaggcataataagggatgaactgcaatgtcacttcttctgtttgcaacgcctctttagctaaatagagagacccgtttgcattggctgtgactgtacgaacgccttttccctcgagcacgatcacgccatttaagcgatcattagcaaaggacgcgtcgatgttttcctggcagcggattgccacactttgcaagttgctgccgttgtctgcttcttccgcacaaaacacaatcgggccccgttgcagcgcaattttgccagcgttggctctcacctcgggatgagcatagatcactttcgtttccagcggaaactggatcgaaatatggtcgcctttttgccaagtccgctccacgtaagcgtagccgttgcggacttccacatcgacaaagtggccattgaccgtgagttgatagtcgtttgcccagctcggaatacggaaggcaagcgtaaatggcctgctcgtgtccggatttacttccaatcccacctctcctttccatggaaaggaagacttcatttttagtcccacttcacctgaaccgattgtgagcgtcgattcgtttccgatataaaggtggataaatccagtttgatttttcgttgtgtaaatatattgaccaatagaagccagcagcctcgctatattgggcgggcaacaggcacagccaaaccacggctggcgctctgttttgacatgctttaaatcgtggcggtgcttagcagcttgtggccacacttcaagggggttgacatagaaaaacttcgttccatcaagctggatgccgctgatggtgccattataaagcgcccgttccatgacatcgccatagcggctgtctgcttcaagttccagcatgtttttggcccaaaaaactagcccaatcgaagcgcatgtttctgtataagccaaatcatttggcaagtcataagcaaatgtaaatgcttcgccaaactctgccgagccgatgccgcctgtaatatacatttgctggttggtcacattgtcccaaagcgttcggcacacttttgccaactgctcatcatctgtttcattcgctaaatccgccatagcggtgtacatataaacggcacgaacggcgtggcccgttgcttcttgttgctgccgtacaggtaggtgtgattgtgaatactcgtatcgaccgctgtaccaaaacgttccgtcctcgcctcgtttttttgcttcgtcgtcgaaaaaatggggctcctttccccgttcttctataaaaaattgcgccaaccgcaaatagcgtcgctctcctttaacgcgatataattttaataacgcaagctcgatttcttgatggccgtcgtagcctctaagtttcccaggttcagggccaaacacttggtcaattaaatcagcaaacttgcacaccacatccaaaagtgcctgtttacctgtcgtttcataataagcaactgccgcctcgatcaagtgcccagctacataaagttcatgattgtcacgcaaattggtccacctttttgtcggcgctttgatcgtataatgcgtatttaagtagccatccggttgttgggcacggctaatgagtgcgatgagttcatcacagcgttgctccagctcaggatcaggcctttcggcaagtgtataagcggccgcttcaatccatttagccacatcgctgtcttggaaaacaaagccgtgaaattcgccctcggcttcgccagcagcgatttttaagttttcaatcgcatggctcggcgccgccccttctatgccatcatgcaatgctgcccattggtaaggaatcaccttttcctttactatgtcaatgtaacgcccccaaaaatcatcggttacgtgtatatggcgagtgcgttgttcaagcattgtcatcctccttttgttgtaagccctttcaaaaatgatcataccaagccttgtttttgctgtcggtagcgaggaaataagaaaaggtggacttttccgcccttctttcgtacgatggaaaaaaatacgggaagggggacttatccatggaaagcgactatttaatgattcatgcgctagaacctgttcgttatgcatcagccgggcgagtcgaaacaatgaagcccttttgccatcctacccgcacgctggacagctatgtattgttgatcggcatccgcggctctttgttcattgagcaagagggtcagctatacgaagtcggtcctggccacacgttgcttttaaaaaaaggcattaaacatagggggatcaaaccgtctaagcctggcttatcctactattggtttcactttaatttagacaatcaccgtgcaacgtatctagacaaaaaacaaatggacgaacagattatgcgctttcgccaagaaccgtacagccatattcttgcttcattcatttttataccgacgtttttcaagccaccagaaatcgaaaggctgaacattttgtttaatcaactaacagaccttgcccaaggaggtggccgcactcatttaggcgccagttatattatgacgtcattgctaattgaattgtcagaacaactgattgcctcttatgcttcgcctcttgcgaaaacaagccttcaacgcgatttatcccacattatggaatggattcgggtatacgcgaaccaacctcttaccgttaagcgcgtctccgaccagtttaattacaacccagattatttaacgaggcagtttaaacaacatatcggcatgtctttgcaaaaatacattacacttgtcaaaatgacaaaagcaaaagacatcctatcgcggacgagacgcacgatcaaagaagtcgctgctgacgttggcatccaagacgaaaaatattttatgcgccttttcaaaaaaacagaaggcatgacgccgactgcattccgcaaagcgttttaccgaatccatttaacaaatttaaaggagtaggcaaaaacgggcctttctcctttctctaaaattcgataagtttgcttacacgctgatccacttcaacacacccttcgctattcccaaatttcctttcgccaaatgacggcatcacgaaacctacatttccccatttcttgattaattattgataattatccgctatccttatctcagttaatgatgacatggaaaaggagaggtctttgtgagcacaatcatgttagagacgaaacaactgagcaaacgttttggcaaacaagctgctgtagcagacgtgtcattacgcgtaccaaaaaacagcatctatgggttgcttggtcctaatggagcgggaaaatcaacaacgctaaaaatgttaacgggcattttacgccccagttctggggagattttatttgacgggagccactggaaccggtctatgttaaaagacattggttctctgattgaagccccgcccctttatggcaatttaacagcatttgaaaatgtgaaagtacatgccttattgcgcgggctccctacacaacgaattgaggaagtcctccataccgtcgatttaacccatactggcaagaaaaaagctagccaattttcgatgggaatgaagcaaaggctcggcattgccattgcccttttgaatcagccgaaattgctcatccttgacgagccgacgaacggattggacccacttggcatccaagaattaagagagctgattacgtcttttccgcaaaaaggcatgaccgtcattttatcaagccatattttgtcggaagtccaattaatggcagaccacattggcatcataagcgaaggccgcctcggctaccaagacagcatcaaaggcaaagatgacttagaagggctgtttatggaagttgtaaaaacaaacaggaggaaataaacaatgttcatctcatacatgaaagctgaaaacttaaagctaaaaagaacatttgcgcgaaaaatgattggcatcgtcccactcttaacagttgctttttcttttattatgaacatggaatactttgtgtatctcaccttcaattggtggtcgattttgtttatgccgatgatgattgctttgttttgcgctttggcccacgtccgggaaaaacaggcatccaactacaacggcatctattcagcgcctgtcgatttgcggctcgtttggctagcgaaagcaagcgttattgccctttattccctttcttcacaactcatttttcttgtagtcatgtttctgatcgaaatggttgtcccactatttccagtcggtcctttccctgttatcgctgcttgcttcttactgtgggcgacgacattatggcaaattccgttttgtctcttgcttgccaaaaaattcggctttgcggtttctttgatcgtcaatctttttggctgcctagcattcggcattatcgccgccacaaaagcttactggtgggcatggccgtggagctggccgatccgagcaatgagccctacgattggcatccacccaaatggcttgccccttgaagaggacgacccattgcttagcatgactgtcattccgattgctatcatactttctttattgttgttcgcagtattgcttatgatctctggaaagtcattcgctttcgctgttgtacagaagtcgaaacaggaggtggcataaaggcgtgcacctgctacgatgtttatatgccgacgttcttaaaacgaaacgcactgcttttatgtgggttcacttacttgctccactgctgtattcagccgtatgcctgctctatttccacgtccgggaactcgatggcgctcatatctatgagttgtttatgacgccattagcgattgccttgccttttgtcgttgcccttgtgtgcggtttatcggtttctcaagaagaacgagcggggcacttccaaaacattgtcggcgccccattaccgaaactcattccgtattttagcaaaatgatctttctaattttgttaaacggcgtatccatctttttggcgatcgggttattgtcgctaggtttcctcttatcaaatgctgaactaccgcttctgccttttttgattggcggggcatggctagttgccacaagcgttgttctttattttttctatttttttgttagttgtttgtttggaattggtgcgtctgctttgtttggcgtcgctggcttgctgatgacagcgcttatgggcacagggctaggcgatgcttggtggaaatacaacccatgggcttgggggacacggttatccgggtatgcgggaatcgtcgagtttgaacaaatggaacctgtttttttgtcctttcttcaacaagaattgcgtactgggttcatgatcgtcgcatctgttatactattcgtaacggttataagcagtatctggttttatcgttgggaaggaaaaaaggcgttagaataagagttttgacgctttttctccttcgcaagtaaaaagaacgatcaataaggaatggttaacagatggcaaacattcttgcagtcgatgacgaacaagacattcttgtgcttatccaaaatatcttgcagcgtgatggacataaagtcgatacgatcgctcaaccaaacaaagtcgctcttaacgcttttgcgggttacgacctgattttgctcgatgtgatgatgcctcatcttaatgggtttgacttatgcgaaaaaatccgtcctattgttgattgcccgattctgtttttaacagcgaaggcagaggaagctgcagtcgttgaagggtttacaagcggtggggacgactatatttcaaaaccgtttagcatacgagaactcagcgctcgagtaaacgcccatttgcgccgggaaaaccgggaaaaacaccatactaaacgggtgatctcagggtttgtcttcgattttgacaataaagaagtgcatatcaacaaccaaaagctaaacttgacaaaaaacgaatataaaatttgcgcctttttggcgcaaaacaaagggcgcacattttcaagggaccaaatttacgatgaaatttatgggttagacggaaatgccttgcatggcacgattactgaatttatccgcaccatccgcaaaaaatgcaaagaacacgaagtcgacccgattaaaacagtttggggaatcggatacaaatgggaataggcaaatcaaacaagacgctgcggcgagaactgattttttatatgttaacattaggcgttagcctaacgatggtggccgccctctacttgttgcttcatatcattgcattaaatgcaggctttgtttacccagctaatcactatgaacgtgaagctgaaaacctgaggccgtcattagaaaaagtggaacaagtgacggataacatgatccctgaaatgatgtcttacgccatttttgataaagaattaaacgtcaaggcaaaaggaacgctatcagacaagagtttacaaactgtgcaaagcatgcttaccaatgaaccctatacaaaccatattcgccaaactggctatatggttgttgaacggcccgatgaaataggcgtcatcgaatacccattgcgagcggaattccgttcccctttcttgcggcagcatttgccgaactatgaactaacgagcatcgccctgctcgtcatcctgcttattgcgaccgcttttgctgtaacgacacactttgccaacaggatgaaaaaacagtttaaaaaactccattcgataacgaaacagattcaagagcaaaatctcgattttactcctgagtcttctaaaatcaaggaatttgatgagatcattgactccctgctggaaatgaaacagtccctccagcattcattgaacacgcagtggcatatggaaaaagccaaaggtgaacaaattggtgccctcgcccatgaccttaaaatcccggtaacggtcattaaagggaatgcagaattattaagcttgagcggacaacaagaagaacagtcggcgtatacgcactatattttaaacgcggtccataaaatcgagcaatacatttcccaattgatccacttgtcccatacagacggatctttgccgctaacattacgtaaaaccgacttagccccattcgttgaaatgttattggcagacgcttcagcctataaaggaagcaaaaacgttaaaatcgtctgccaaaaaaacgagttaacagccgctgaaatcgaccaacatctgctccatcgtgctttgctaaacattgtcaccaatgcgatcgattacacacctgaacaaggatctattttcattgaggctgcctgcacgccaacgactttccactttactgtaacggacacaggcaaggggttttctgctgaagcattaaagcgggcgacagagctcttttttatggaagagaaaagcagacatacaaacaaccattacggcattggcctcactttcgcttccaatgttgccaagcttcataatggcagcctctcgattgagaatgccgcttcaggagggggttccgtatatgtagcgattccgattacagccaagaacgggaacgaagggatgaaaatggaatagtctttcttggaggatacagccgctaccgagggggaacggataaccgtttccaccggtagcgcaaccgtgctttttaggaaccgaggcactcccgatcctggcatcacgcctggactgcctttggctcactttcttccgatgtgctttcctagctatttggcgactcggcctccaaccccatcatcgctccataatattgctgggcagtagtaaaggcaataaacgcacaaagctcacttatttcttttgtagaaaactgctcactcaacagttggaacagcttttcatcaatcgcgtctctgttcttaaggaaaacgtccgcaaaaccagttgccaacaccgtcttctcgtcaacgtggtgctgatctggttttcctttcgccttgcaataagcacagccgtttccttgggccagtgtccttctaacttgctcttttagctccacgctaagacttccttcccgctctaattgggcggccaaatttccccatgcttctaaaatattcggattatggccaagcaactgttggaatggcgtttggccgataggtgatttctcaattcttgccatttgtctgcctcctttgtacaattcaattatataaagtgatcattcggataaacataggaaacgtaatgaatttattgttttcactttataaatcgaaatcataaaaaggaaatacattaaaatgaaaatggacgaaaccgacagaagtctattaaagcttttaaagcaaaacagccgcttgtcgatggcagaactcgggcggcgcgtcaatttgtcttcaccatcggtggcagaacgggtaaaacgaatggaatcctttggattgatcaaaaaatatacgattgaagtcgattatgagaaattaggcttgccgatccaatgcattgtcgaagcatcgattaaacatggacgctatgatgcgttcaaacactatatccaaacgttgccgaacgtcgaattttgttaccgcgtcgcaggcaaagcttgttatttgctcaaactgcaatttgcaagctttgccgacgccgaagcatttattgattctgcaagcccgtacgcgtcaactgtaactcattttattttctcgcaagtcgattgctcgctggaaggctagccactataaagctgctagcctcctaacatatcgttcttccttaaaaaatgatttgcacgagttgggcgccaataagcagcgccattgcccaaatgcaaatggccgagactttgttgacgcgcacaagccatgtacctctcttatcaatcgcccgcaccgtcttcccagcagcagcaagcaaacagaaagcgagccaagaaacagcaatgcaagctagcgcaaacatcgctttctcacttaaactttcatagcgaagcgaactcgtgcctatgacgccaattgtatccaataccgcgtgaggatttaaaactgacacggacagagcaaataacacttgctttttcattgacaacgtttcatctacggcactggcatgttcaggttttgcccgccaaatcgattggccgatccatagcaaaaagacaaacccgcaaacgagcaagaacacttgcagtccaggaatagcaagcaccgctgccgacacacccatgacagcaagcaaaatgagagccgtatcgcataatgatgccgttatgacagcgggcattgcgtttaacagctttttatgtgtcgctccttgattaaaaatgaacaaattttgtggaccaaggggcaatatgagcccgatggataaaatcatgccatgtaaaaaagcgattcccattgccttcatccttttattgattttgctcttcctctcttaccttagctgtggtttaataaaaacaacaccaccaattggctgggaaaagacccaaccaatttcgaagggattacaccatggagattcaactagaccgacacagccaaacaactctatttgaacaaatttatacacggatgcttgaccgcatgtaccaaggcgaatggccaccaggaacaaagcttccttctcaacgaaaattagctgagcaattaggggtcaaccgctcaacgattatcgatgtcctcgatgagttaaaagcagaagggtggctcgaaagcaaaacaggctcaggcacgtatgtagcccacaatagctggcaaacactcttcccccgtcaatatcactggaaagaacggatacgagcaggcattcaccagcctaacttgcagacgatccagcttattaatgaatatgaaacaaaagagatcatccgcctgggcacaggggaattatcgcctagcctcctcccgacgaaacaattggaagaagtgctgcaatcaatttcgcttgacccgcgcacaatcgggtattcagagcctaaagggcacaaagcgcttagacatgcagtagcggtccacttacaaaaaagaggcatccagacatcgccagactgcattcttatcgtctccggcgcgctccaagcactccagctcatctcactaggattgttgccacagcattccaccatttactacgaggcgccctcttacatcgagtcgttgcatttgttccaatcagcaggcatgcgcctttctcgccttcattctggctccgaaaacataacgtacagcaagtcacaaaagcacggattgttttatacgatcccgacgctaaacaatccgtcagggacgatattgacggaggcagaaagacatgacctctaccagcattggacaaatttgcaaattccgattgtggaagacgatgtgtataatgagctcgctttttccgccatccccacggcgataaaatcggttgacacagcaggaaacgtcttatatcttggcagcctttctaaaacagtcagccctggattaagaatcggttgggtcgttgcccctgaaccagtcgtcgataggctagcggacataaaaatgcagtttgattacggggccagcggcttttcacagctactcgctgccacttggctcgcttcgccacaccatgaaacacacatgcagcaactacgggaaaacctacagcaacgggccaccttcacggaagcattgctagttaaacattttcacaacatagccgtttggcaaaagcctaagggagggttttacatctggctccgcttccatcaaccgctggtgacgaaagcactctttttaaaactattgcaaaaaggagtccttcttcatccaggctacttgtatgatcgagacaaccaccaccatttgcggctttcgtttgcttacgcttcacttccagagttggagaaaggaatcgatttgttggcgcaagcagtcaaagcgatgacgacttgatgggacatcagtaaatagataaaaagccccctaaagcaaaccaactgttcgccttagggggcacatgctattagccaaacccctttacgttgtgctaacaaaaagaggcattactgtgtgagccgctttaatcactgacgctgccgaaaccattttcgcattaaaacaacatgggcttgatggtaacgactatggtcagccatatgccaaatgccccaaccgattgtcgctgtatgatcgttgtatgggatgatcttatccagctcttcatccttaagcgtttgacacgtttccttaaaagattggaacacgacgtcgtaagcatcaagcacatcgacgatggtcgagccgctctcaacggcaggcagcttccctgttgcatcaagttctggcccatatgctttttcaagctcgacaggaagaggttcttccttgattcggtaattccactgcaaatccacaaaagccaaatgcttcaacagctggccaatgctattgtatgcttggccaggccctttatagaaaagctcttcttctgacaccttttccaaaagcccccgaagtcgctcgtaattctcctccaccatcgaaaagagcatgttcacgcgcggctccatctctgtttgtctatgtaaatgataatgcaaagcaatccctccctctcgtcagcgtaccgagtatagtcacaaaaagctactttcctgcttgaggcaagcaacgatcccttttttctattttgtggtaaaatggacgtacaaacgttaaccacagcaaacaccacctatcgcaaataaaaaaaatatctatagtagttttaaattcatctgcaaacgttaaaccaacacataaaaaaggcgtggtctaaatgggtcctactgtttacgatccgaagaaacatgccgttattctatttgatggcgtgtgcaatgtatgcaaccattcagtccagtttattatcaaccatgacaagaacggttattttttgtttgcctctttgcagtcgccggtagcggaatcctatttctccacactaggcatttccgacaaaaacctacgttcaatcgtgttgattgaaggagagcaatatgtaaccgaatcaaccgcagtcctacgaatttgcaaaagactaacgggactatggaaaattctctatgtacttattcttgtccctcccttcattcgcgaccccgcttaccgcttgtttgcgcgaaaccgttaccgcttcttcggcaaacgagagcaatgcatgatcccctcccctgaaataaaaacgcgctttttagattgatggtggagcaaaaacggagccgcacacgagccaggcattgcggctcttttgttgggattgtttgaggaagaagagacaaacacaaatataaattatggctctcttcccggctatagatccaagcatatgccccttctgcctaaatccagacttatgcctttgttggtttcacggggagttacaaaagggttatggtatatctatcaattccgtaatgaatgcgatctctaaagtatctacaatggaatagcaatcccgaagaaatcgagtatgccagtataaggtatactaagcttagtaactgtctcattctacacttgtcagtcattcatttaaggagaagcttatgaaaaacatttttaatcaagcggacaccacggagatcttgaaccggatagacaaattgagcccaaattcacgccctcaatggggtaagatggatgttgcccaaatgctagctcattgttcctcgttccatgacattgcaatgggagaaacctttcccccaagaggttggttaggcatattaattggaacatttgtgaaaccgattttttataatgacaagccaatggctcacaatatgtctactattcctacaattatgattgtagaagaaaaagaatttgaaacagaaaaaggaaaactcaaacaaaaaattagaacattccagaacaatggcccggaaaaatgcacgtctcacccacatcccttttttggtaaactgactcctgaacaatggggaaaaggattatataaacacctggaccatcatctaaatcagtttgaagcttaggcattaagtagcaccaccaaaaagagaccttgataagcttttagctaatcaaggtcaaaatatttaattaatataatatatcaattaattcaacctcattcaataaaattggataggagtcacaaccttcaaaaacattgttacccgcttcctcataactattagcaaattcgataacgtacgatactaatcctttaacaaatagatgcaccctgtgggtaccatcagctccttggttgatcctgtatatacgcttccagataaattagtctttaagaagcatcctcttagacatgacccagccatttaatccatacgaagcttgtatcttatagtaactagagttatttttctaaatgtactaataatagtttagttttaatcacttatttccaatgttattaaatttctgaaaaccagggatacattttaaaagttattcgtactgtacgattcgtaaaaacgtaatttaagtcttacttacatagattactcatactcctgcataaaaataaactattcggcaataggtagccccttcatcaaataaagaaaccttgaaaggcttaagccagtcaaggtctagttttactaattattttccttcacttcttcgaaccataaattaaagatatcatccggtaacagttcgtcatcaatcgaatacactaaatcatatctatattttccttttaagccatttttctttacatggtaacacaatttcatttctgttggcatgtcttgattgaactcttcacattttttatgaataagctttaaattttgatttcctattcttaatgcagccttctgtctttctctcgaaacatcataaacgtgattgcgttgactatccaattcttttacagcctcgtttagttgatgtttatgaacagcctctccattaattttatagaaaaaatcaaaaacatacattttgggttcatacgaacaataaataaagatttcatctgctttattattgacatactctaaacaaatagctaccatgtctgcttgtagctctgaaaaatagtcctcaaataccttcacattatcaccattagatttagaaatttatcatttactcaagtgtagagagatactcttctaaatgctttttcccggaattgctttttggcataatgccaagatgcttatatttccatatagtttttctcatatggggatctatatttgaaagattattataattaaaatcaatattaaactttccggttttatcaaaaatcatagtaaaatttgaccaagaatcttgaccattatccttaaacgctctccaaagttcttgaataaaatcaactaatcgatgccatttttctgtgtattcacgttcactaactggaaataattcagttatcttatgactgtttataggtttattactgccttccgggtaataataaaagtaagcagtttgagatccttcaacaacctcaccgtataaataaacctttgaccattcttctggaattgtttctacaaccacctctgctatgtgtttatatagtctatctaattgttcttcattcatctaattttccctctcccggtacattatcaaaccgcctaatttcccattcatcttcaccaattttgtacttaatattaaaactttctggtcgttgtgaattccccttataggttggagtgatctttaccgttacttcatcaccttgcttaagtgcttctgaccatgtattctcaagttttttccattcacctttatttaaatttccattcatagaacaagattgtcaagatctcctgagcctttgaaaatacttgcaattaaatggccaccttcatcatcaggttttcgattttctcttcctactaccttttgggcgtagttatttcttttgccatctcccaaattgagagtaccttcagcactatttattcgaccttggctatctgttttataattgtatccctctttacttgtatactcaacattcgattttagtacttttttacgaccattcctagtgtattggtccccgtatttaacttttgtaataccactacccgtactcttcccagtcttcaccttcctcgccttcgacaagtcatatccgagttcagccactttcgctggcttcactaagataaacgtggttgccaaggctttctccccgagcgaagcttctgggtcggcgagcgtgaggaagtcgtctaaatgaaatttgattgctggagtaaaggttatgatgtggttttagtagtagactgaccgtcgggatgtctacgtaatttaaataaaaaaccttgaaaagcatttagccagtcaaggtttcataggtattcctaccaatttcctctttcaaaatcttcattaccaagttctttgacataaactgaaatccataataccgtgtgttctacagggtctgtttcaataaatattccttttggactatagtatacttcttcaaaatcatcgtattcaaaacttggctctatttccaaaacctcgtcaataggcataccaatataaattttatcaaatagctttccagtatagttctttaatgcagttattttgaataatttcccattaaataaattaaaccacaagtaaacttcatctttaatttcatatctcactagagatttccctaatagcgtatccgcatcattgagattattaataatgtcataaaattcgctgatatgactgtaaagttttattccacccatttccttccatggaataatgggagcattcaataacaccatagttaccctcctgtgaaaattattgttgctgtctcttttccatctgttttatatgcactttcgtcgttcgtactaattttcacatatggacttcctctccgtgtctcccacctcatttttgctcctgaacttgatttagtggagtcttttacagtaacgtcataaccttcattttttagcattcgggcgacttcatccgtcgatttccctttgaatgcagttggatttgatttaattgcatcaacagtgactttaccattattgagaactgctttacccgtacccttcccccagtctccaccttcctcaccttcgacaagtcatatcctagttcgggcttcactaaaataaacgttgttaccagggccttctccccgaacgaagcttctgggtcagccagcgtgatgaagtcgtctaaatgaaaggttgttctgctggggtaaagactataacgtgattttaatacgcctgaccgtccgagtgtctacatgatttaaataaaaaaccttgaaaagcatttagccaatcaaggtcaaactttgaaatagcaaactattatttggatcgttctctttcccataccttctttccgtcaggtaaaattattgcacttgggggatcatcatagagagaaatttcgaccaatgaacctttcttttgtattaaccaattgtatacattgcctttgttattactaggatgagataagaatttatttacaataaatacagcagcatcatattctgtataatctatatcatcttcatctaatccattgtctgtttcgaaaactgtatctagttcgccaataattcttaatccattttcccattctagtattatgtcactatcttcataatttattaaagttcctattaaagagtcataccccatacgcaccctcgattcttttgttttttatggtcttgattggtactatataagcgccgtcttttccataatgtattaatcctttagtagtcgtatgatatttaccagtattacgatcatagtatttcccgattggttcaccaaagtctactctttctttattgccgtttggtagtagatgaccttttccagcaaacttatcaagtaattcttgtgcttttttattatcgccatagaagatactcttgtgttttccatttgcaagttcttgtttgtaatttggagtatgaggaatatgcttctcttgtgcacctggctttactttaactggaaatcaatcggcatgagctccttgatcgatcccgtacatgcgcttctttgccagataagttagtctttaagaagcatcctcttagacatgacccagccatttaatccatacgaagcttgtatcttataatagtggtaattatttttcttaatatattgaaccaattcctttatgtcattatagtccattggccaataataactttttcctttttccagtaattctttattctctacaacaaataaatcaatctcgtcttctacaatatccacaagtatactgttaggcagctggtcttcaaaatgaaaagcataaagatcttcaaacacaattttccctttttcattttgttcacttactattgccatttctatttttaaggattcaaaatctatttgataatttaccaccttactatcatggatttgtttcatcgatttctctccttatcagagtttatgactttaaataaagtccattcgctataaaaatctgaaccgtattgttgctctaagtaatttaattttctaagcaaagagccttcatctgtatttctataggataatacacctttttcaaatttaactaccattttctttttatctttttcatcgctgaattctaatacgatcccttctttattatcaataaaagtgtcattgtataaccttgagggtattccatttgttggtacccacctttcccaatgttccaatactcttcctcctatcatcttcaacttatttctcttactcttctgccccttactaggtagcccctaaaaaaagaaaccttgagaggtattgaaccaatcaagattttttcaaattctatacttcttgcttaactaaatctaataaaaaatcaccaaagtcgttagcaatgatttcatatgtttgactctctaagtctactccaggtacaagagatactactttcggctctccattatcatcacgttgattaaagtctaaacaaaatagttcgtcactcccagtatcatatatgactaaaaggttatctggtagacgaatttcctttcgttctgttagagtgtaccatatagcatctggaactgatgaattttcgaaatcagcatcaataattccgtaaatttcttgtgctccgaaattacctgctccaaatgtctttaaataatctaaatataaaccagtaaactttaaccctaatttttcttcagccaaactaattaattcatctgttcgttcacccacaaaatcagcaatctcttcttcattcataataatttcctttgctttttgataagtctctacactcatttccatccccctttacattaaataaaaaccttgaaaagcatttagccaatcaaggtttcataggtattcctaccaatttcctctttcaaaatcttcgttatcaagttctttgacatatactgaaatccataataccgtgtgttctacagggtctgtttcaataaatattccttttggactacagtacacttcttcaaaatcatcatactcaaagcttggctctatcgttagcacctcgtcaatgtgcattccaatatggatgttgtcaaacagtttacccttataatcttttaaagctgttattttccataatcgcccatttagtatactaaaccacaagtaaacttgattttcaatttcatatctaacatcaaacattcctactgttaaaattttaggtcttgatttattaatatactcataaaagtcttttaaatgactatatagttctatattccccatacctttccaaggaacaataggtgcatttagatcaagcaatttatttccccctgtgaagataatcgttgctttctctgctccatcagttaaataattatttggacttccatcaacaaccttaataataccttggtcactcgtacttatttttaataatcatggtagtaactaatgattttgaataacacgataagactccccttttacaaacaaaaatcctaagaagattttctacttttctcatcctaggatagaatatgcctcttaatcgattaaatcagcgatatataaaggaaacttacttgatactgcttttttaaggcattccatatgacagaacatttgttgttcttgttgactacttttatctttgcaccagtttgcaactacaactagttcagtaacatctgaaataatttgtttatcacaaaaacaacactgatacgattttttctccataaagtcacctccaattgtttctgtaatttttggtattgagcagcattatgtgtaggatttccttccccctccccccagtcttcaccttcctcgctttcgacaagtcatatactacttctcccactttcgctggcttcactaatataaacgtcagggagaaagcaaaggtaaggttttatgaaagaaaaattggtggtaattgataatgttaaggttatttacgaacaatgaaaactagaattagggtatacgttttaaagcgatgtacgtactaattggtaaaatatcccacagggattatgaggtttacaataagaaaccctgaaaggcattagccaatcaaggtcactacatttaatcatcaacttttttcacctttagtgaagtctactcctatgatgttatttctctaatatgtatgttttataaggaccatcttccccttctttaaatacatatattctctcacatttaggacatcgccatacttcatatcgaggttctggtatagagagagggtcaatcttctctgcttggttaataatatcatcccattcttcatcagtataaaccactaattctatattatttggtgataatgaatttgtaagaagttctccacatttacaatttaatctcgccataattccctcctatggataagtaatcaatccagcatttgtccatatttctatttttccaggtattttattatctgaatatgttcctgttgccctatttattatttgacgagcctgttcagtagttaatcctgcctgtctcccatcaataataacagtttctgcaccttgttttaatcctttttgtatccttgtaacacctgtatttatatttggattttttaaagtctttaactctgtcttaacgccattaaccaagaaatctagtgttttcactccactttgagtagaagtaggtataatttctaccttcttcccatttgcaagtaaatcatctacaacctttctttcagctgatgttaatccatcgagttttccaattagatttcctttcccccttccccccagtcttcaccttcctcgctttcaacaagtcatatactacttctcccactttcgctggcttcactaagataaacgtcgttgccaaggctttctccccgagcgaagcttctgggtcggcgagcgtgaggaagtcgtctaaatgatagttgactactggggtaaaggctataacgtgattttaatacgcctgaccgtccgagtatctacatgatttaaacaaaaaaaccttgacaagcttttagccaatcaaggtcaaaattgaaataacaactattatttagatggttctctttcccatatcctctttccatcagataaaaatactgcacttgggggatcattatggagagaaatttcaatcaatgtacttttttcttgtttcaaccaactatatatactaccttcgttagtagtaggatgggataatatacgctctacttgaaaggcgactgcgtcatactctatataattaacatcatcgtcttccaatccattgtcggtttcataaagtgtgtcaggttccccaataacctttaatccatttttccattctataatcaaatcgttatttttatacttttttaatgctgaaattaaagaatcatatcccattcatatcctcctcggttatcgtttcaaaggttctgatggtactatatgagctccatttttgctataatggattagacctctagtagtctccacatagtttcctgtatctctgtcatagtatttacctatcggttcaccaaagtcaactctctctttatttttggtcacagtggttcctttcccggcaaacttatcaagcaattcttgtgcttttttattatcgccatagaagatacttttgtgttttccatttgcaagttcttgtttgtaatttggagtatgaggaatatgcttctcttgtgcacctggctttactttaactggaaatccattaacttctctatacagtcagctaggtactgatttcttgccaatagaaggagcgccattccccctcccccagtcttcaccttcctcgccttcgacaagtcatatactacttctcccactttcgctggcttcactaaaataaacgtcgttgccaaggctttctccccgagcgaagcttctgggtcggcgagcgtgaggaagtcaccgaagaaaaagtcgaccactccagcaacaacgagattttcattcaaccgctcctcgttcggagggttgttctcaagatacgtgttgatagctgcgacttcttgatccgtaaacatatatcctggtgtggtgaccacttgcgacgtgtccgtttgaatcgcttgggtacggagctgggcttggtaccattggtattggatcggaaccagctgtttcagttgccgtgtcaggattgccggcgagacggtcgcgtttgcgggcaaagtcgataggcgcgcaaacaacgggaaatacgccggggtaacggcatgggtttctcccatcgctggcgctcgacacgcttgcagcgcctgttcattgcttagaatggcactgacaggtattggttaaattctaactgtttctgctcaagagcagttaacattcgttactcatttttacattccctgttcttagttgatttggttataacgggttcgttgtaaaagaagacaaaaaaaacgaaaaatggatttttttaaaatgtccatttttcgaggagacagttcattcatagctaatcaaggtttcttttattattattctttaccaattagtatagtattacaaacaacttctacatttaaaggaggcattaaaatgttacattttaacatacttttcccctcaatctgcacatctgtaatctcaatatcttgaataaaataaggaatttgagttttggttaactcttttaagggtttcaatctatcattaacacttgttacaaatgagaattttgaacatccagtaaaaagtaagattacattaaactctgtgtcttcaaatacaattcttatctcgtccccaaaaaaacttgcttccatttgcaaaactctagcatcccaataatgcagttcttcaatttcatttagtattttttgtgcattcaagttaacctacctcactttttatatggaatatgggcatccggactttttctatccacaacatttaggtttacatcaagcggattaccactttcatcaaatatatgaacatggtcatactttgtaactttgtcaggaggatcaattctcatccggatatttccattagcatctctaatatgaacaaaaccgttatattcagtgtgtttccagttactcggtagcccctctaatatatcatttttggtcatgttaggaatattatcggcattaatttttcctgtaaaattacctacacgattgccgttccccttcctcccagtcttcaccttcctcaccttcgacaagtcatatactacttctcccactttcgctggcttcactaaaataaacgtcgttgccagggccttctccccgagcgaagcttctgggtcggcgagcgtgaggaagtcaccgaagaaaaagtcggctgctgcagcaataatgggaccaatgtcgtttctatacgcgatcccgtcggcgccaacacgggcatccttcgtcggcccgggataacgcccgtctttgtatacttcctcgtcaacttcggctatgaggggaccgtcgccgggagggttgttttcaaggtacgcttgcatggctgcgacttcttcctcggttaaaacagaacgtcctgtggcggctacttccgaaacggccgtttgaatcgcttgggtacggagctgggcttggtaccattggtattggatcggcaccagctgtttcagttgccgtgtcaggatcgctggcgacaccgtcgcgttagcgggcaaagtcgataggcgcgcaaataacgggaaatacgccggggtaacggcatgggttgctcccatcgctggcgctcggcacgcttgtagcgcctgttcattgcttaggatggcactgacagggaaatggttcaagtaataccagttagctgctttcaagctactgtatagaggggcgtaggcgcctgtatacagaaattcgagcggcaagacgtcttggtacagatccccttcacggccttcgatatggcttcggtctagtggggccatttggagcgcttgtgtcacgacattttggtacagctcttccatattggcatcgatctccgcctgcgtttctggggaggcgatcacgccgccactggtccagctggctacttggctgacgacagtcgtcagttcttgcaaggtgctttttgcgcttgcgagcaccgtgtcgttggcttcgtccaagttgccaagcctttccgccgttacacggacatggtctttgccttgttgggcgtagcgaaggactggttccatcgagaacgggggcagtggcaataggtcggcgatggaagcgcgaatcgactcaatcgctgtcgcatctgcgatcgcatagcgctcgactcggtctaggccggttttgacatcggcgagaaattcttcccgaatcagggcggagctgctttcaaagttgagcaaattcgagcggatttgctttaattgttcgatgtattggccgatgaaaagctggaacgccgccaatacagggagatggagcgtcgcaaaatggtctttgattgcttcgcccccttcgccttgcagggaatcaaggtcgatgatcttctggatgctggcctgcaagcgttcgagctgggcttgatcgtgaagctttcgtaccacgatttcgtcaagtgcatcgagtacttcttgtacgtcaagtgtgttcatccgtttgttcctttctctattatcggcggcttgccagcatcttgtctacaactccgtatgtttgaacgagttctttcgtttctgcttgtacgtttttcacgacgtccaaatagcgattgaattggtcggcatacccgctttctacttccagcaatgaatggagaaaggccatcgacgacgtatggatcgcaagctcgtgatccgacacagaatagctggcctgttccccggtttcacttaaagcgctgagcacggagccttcgtcgattttgatttcaggcatcggttctttcctccttcctatttcgttgcttttaacgtttggagcgattgttgttttgtgtcgatcacgatttggcaagaggcaatcgtggtttggagccgcctcgtttccatttcaatcgcgcgcatcagttgttccgtttcgtcttgtacgttcgagtaagccagttgcatatggcggcgaatgtcatcgtgcgtcgattcggcttggccgcgccacgcatcatggtctagctctggttcgctcccccattttttatggtcgtgaagagtcgcttgttcggaaacaagcgcttgtttggccgcccgcaatcgctccaattgcgcttctgtctggaaaagttgcgcccgcatttggctaatttcatagtggagcttggctatttcggtttgatcggccatcctcccccctggtggtttcatccttccgtctaaaaaaatggctattcattccattttattttaaaacaactgttcgaaatcgtctagaaaaagcagactcgtacgtcaattaaacgaaaccaatatagtaaggcgtttctaaacggggactatcggcgcccccgatcctgcagcatacaaaaaaacctcgaggtgctactcgaggtccgtttctcgctgttgctgggacttttggttcgcctgattcgaggcttgttgttggccattgcattttccagggacggtattgtggtaagcaggtggtgctggcggcaaatgaggcttttgcccccaggcataaggttggggcgaatagtgaaaattccctctaccgtcaaagcttggcccgtatgcccagcggcctttcctgctagcttctccttctgaaaagttgaagagcgtataagagacttcgcttttttcgagagagcggggaaaagtggtcggaacgacaatatcttcttcacattcctctaattctttaatggctgcataccacatgttttgatagtatgagtccctggcaatgagaaatgacagcatgtcgcgaacacctggatcatctgtcattccatagagtcttgtaacttgcaatcttccttgagactctgcattcaaattagcgcgaaagtcagcgagaaggtttccgctggaaataatatacttggcattccatgggtagccctcactgtctgacgccattgcgcctaaccctgagacaatggcatgctggggattggtccctcctaaaacagcggcgagagccgggtccatttcataagcgttttgttgtacttcaaatggagcgttgtcaagcagccttgcaatcatcgtcgcaagcatctccacatgggcaatttcttctgtccctacgtctaataacaaatcgcggtatttcttgtctgcccggcagttaaaaccttggaaaaggtattgcatcatcacgctaatttctccatactagccgcctaacacttcttggagcttcgctgcgtatacaggatctggttttgatggcttcgcttcatactgaagctcttttacgtggtaaaacaaggccccatctcctttacagatggctgttatgtacagccctcattcacttaaatcgattttgtttccaccttctgtgcatactatacgttatttgagaatgagcctgtatcatgcctgcttttttcctgttatcccaaaagcaacgcaatgccatggtaaccaaagtaaacgccgaagccgattaggcagacgccagaaaaagcggaaatggcaatgagcgccttttcattcataaaagcgcgggcggtgcttgagagaacagccatcgtaaaatcccatgccgctatgcctataaagatcgccacactgtacagccaaacagtggccatttcgtattcagcaatcgtttttgctagcaccgagccataaatgccgagccaaaataaaatggtcaacggattggaaatcgagatcaaaaatccaatttggaatgattgtctcggtgactcgtttgaccttacgccgagacccgtttgtgcctcttttttcaccttcataatgctctcaaaacctgtataaataaggacaaagcaaccaaacagccataagaaaacggttacgacctcatactctaaaaaacgggaaacccctaaaaacacagcaaacatgtacagggcatctgctgccattgccccaaggccaacagcccatgaattcataaagccgcctttaatgcctttttctacttgagccgcattgactgggccgatcggagctgccaatgaaatgcctaacatgatgtaacttagaaataccaattttaatccccccttgtcccagttctactatattcaggaacaacgggttgtacgactttaaatttcgcctggtatagaaacgaaatcaaaggcagacgctaatgaggagacaaaggaggaaggttggccttgagtaagaaaaaagaaaaaaatacaagtttaaactggtggcaactttcacttttaggcgttggctgcaccattggcactggctattttttaggttcgagcattggcattggcctcacgggcccttcgatcgtaattgcctttctgcttgctgctctcggcacatacgtcgtctttattgctcttgccaaattgacggctgacgatccgcaagaaggatcgttctgttattatgcagaacaagcattcgggaaccgtgttggctttgcctgtggctggaactattggatgtccaacattttaattatcggcagccaattaacagctttatcgattttatcccgtttctggtttgacaatgtgccgctttgggtgtttgcctcgatctattcgcttctcggcattggtgttgttttgctcggtacaaaaggatttgattcggttgaaaatgtcctcgctgccgtgaaaacggcggccattctgttgtttattgtgcttgggtttctcgctgtttttcaatggctagatgggacaggggcggatccatctgttccgtcttcgtacaatgagttgttcccccgggggataaaaggtttttgggggtcgcttatctatgctttttatgcatttggcggcattgaagtcattgggttaatggcgatgcaattaaaacaaaaacaagatgcccctaaatcaggcacagcgttgttgttgcttttagcgatcatttataccgtttcattagggcttgccgtcagcatggtctcgtttgaccaatttacagacaaagaaagcccatttgtgaccgcgttgtctgactatcaccttgctttcttcccccatgtgtttaatgcagccattattgtcgctggtttttcgacaatgactgcagcgctatttggtgtgacgacgctgctaacaaccttagcccatgatgggaacgcacctaaatggttcgaaaagaaaatcaaatacaaggaccttcctttgccttcccttggccttgctgttgttggcttaatctgtgcagtcgttgctgcgctattattgcccgggaaactgttcgagtacattacaacagccgcaggaattctcattttgtttaattggatttgcatcgtcttgtccaatatgcgcttgctaaagcaaacggttttttccataagtggaaatatcatcggcattttgttgatgttgttggccatcagtggcatcttggccgaaaaaacgggacggcctggcttttacttaagtattggtttcgctgccattattgtgcttattgcgtggtttgtaaaaaaaccgcataaagaacagagtagctcttgagctaaaagggcttacgttggcgggaatgaatttccatatttcactgcatagatcaaaaaaatgagttcatactaaaagccgtaaggacatttcaattaggaggacaaaaaatggatttccaacagcaacaaaatatgcaccaaaacatcgaaacaggcactgtgacgccacaaatgaaccatggcggtcatgaaatgtttgatgtacacgaagttctagcaggatcaattaacacaatgaatacgtacaccatgttaagccaacatgttcaagaccctgagcttcgtgacattttggataggcaaaaagcatttatgaaacaggagtacaacactactttagaatgcttccaaacaggtcaagatcctgcagtgccgacaaaaagctacaaaatgaaacaaggcaatgattttacgtatggcatgaagccaggcggccaaccaaaaaaaccgatggaatcaacggctgaaatcaacgatgaaaccattgccctgtcgatgttaaacgcagtaaaatcagttgctcctatcaaaacaagcgcggcaatggaagcgacaaacccagtcgtccgccgtgtgcttgccgattctttgcccaactgcattgaaatggcttacgaaatttcgctttaccaaaataaaaagggctattaccaagttccgcagcttgttcagcaagatatgcaacagctgcaaaacggctatgcccaagcttctatcaactcgcaaatgcctggcaactctacgcattaaaagcgagtacatgccgagcctcgtgcttggcatttttattgcaagcgatcaactgtttacttttacaatatttttcaccaatataatgcttgaaatcgtctgatcttctggattattataataaaggttgctttttacatcacttcgaagtttacatcaaaaaatttatatattgtgaggtaatgacatgacgctacacgacatagacgattcattattggtcgattcttacgtaaaagcggttgaacatcgtttagaagatgattttatcgcgctgttgcaagaagaagtgttgcgcagaggcatccgtctcccagaacttgttcactcctaaaaataatgatttattttttcttccttttatcctgtcgcagtccaaacaaccgtccctctagcattaacacaaattcagacagcgacaggctcgacttcttttatccgctccgtttcatttttgccaacgcataattggctatagctgtgtcttgcactcctgtgcccgtcaaatcacaaatggttcgttcccgttcagacgttctgccttccttttctcccgttaaaatcgctcctaactcaattgcatgttcagctaaaaaatcttgtacatgatggagttcgccgatcgtcgagctttgtgaataaaggtcgcatacaactttgtctgctttaaaaaatgctgctggctcgatttcttgcttatgctctgcatctgagccgatcgcagttacgtggacacctggtaatagccaatcggctttcagtatatagtgttcggctggtgttgtcgtcacaatcagatctgcttgttcagcagcctcttgtccacttttcgctacgtgaacaggaacgtttagttcatcctcaatttcttttttataaaggtgtactttttcttcagaccgtccgacaacaatgacttccgcaaaattacggacaagcttaagcgcttttacttgcaggcgggcctgcatgccagtgccaaatacggcgaccgttgagatcgtttttttcgctaaacgatcggcagcgatcgcgcctgctaacgccgtgcgcacatctgttaagtagccgttatcggctagcagtgcttttggcacgcctgttctagcgtccatcgcaagcattagtcctcctaagcttggcagcccaatcgaagggttgttaaaaaaaccacaagaaactttaatcgcaaacgtagataaaccagggatatacgccgttttaatatctgcttctccccggtgttcaggtatatcgacacggatgacaggaggctgtgagacagtgcgggaatgtagctttttaaacgcctcttcgatttcaatgagtgcatcatcgcatagtgttacatggttgcggatcgcttcttcctgatagtgctccataaacatcactccctcagaccttttttggcatagctatctttttttcctgcctacttcttaaaatttattcgccaactgaaacaggaattcacctgcctgttgtcaaattggcaaggaagagcatttgctaggcatgaatggaggcatttcaatggacacgattcctgtcaaatcggtttggcaagcccgcaaacggctttttccctatctgccaaaaacgcccctcgtttatagcgctcccttatctggccattgccaaacacccgtttggttgaaattagaaacattacagccgagcggctcttttaagctccgcggagcgatgaacgtgctattgtctatgtcagctgagtcaagacaaaaaggcgttgccgctttttccacaggtaaccatggccttgcggtcgcctatgccgccaaacaggctaaaacgccggcgacgatttttgtatcggaagcagtaccgactgctaagcaagctgcacttcaagccagcggggcaacgctaactgtgacagggcgcagccaagatgaagcaggagccgcctgtatccatcattgtcagcaaacagggcagacgctcgtcccaccatttgacgacgacaggattatcgctggccaaggcacactcgctttagagctgctagacgatttgcctgaacttgatacggtgatcgctggattatcaggaggagggttgcttagcggcattgggctagtaatgaaacatactgatccgacgattcaagttgccggggcaagcatcgtcaacggagcggctatggaagccagtttggcagcgggccatccagtagaagtagccgaacagccgactgtggccgatagccttcttggcggaatcggtctggacaaccgttggacgtttaaggcggtgcaacgttatgtcgacacccgtgtacaagttccagaagaagacattgccaagacgatggcgtatttatatgagcatcaccatttaatcgtggaaggagcagctgccataggagcagccgcactgttaaataatagcattcgccctaaagggcctaccgctgttgtcattactggcgccagcattcatccaaaagagcatcaccgcattattcgcccttacctctagccgaaaaaagcacggacggcatcgacgaagctatagatgccgagccctgtacagaggacaacgacaatgccgccaacgatattcatttttaatgaattcacatagttgccgaggcggtttttgttgttcataatgatcagcaacataatggaaacaaaaggaagcaacattccatttaatgcttgggcaaacaggaggacgtcgagtggctcgaacccgaagctcgatgacacaactccgaataagatgacagccgcaaagacgattttaaagcgtttgtcacgcattccccctgaccattttaaaatgctgctagcggtaatcgctgcccccagtggagaggcaagcgctgaggaaaagccagcggcgaataaaccaatgctcgtgaacacgagcgcccaacttcctaaaagcggttctaattggacagacaagtctgacacatttttcacttccatgccttgcatcattgtagcggacgtaatgagaatagccgcagtaatcaagccgcctacgctaatcgaaatgacaatatcccagcgggagtctgctaaatgggcgggcttgttccaacgctcaatcacgttttccgaatgaaggaataaattatacggcacaactgttgtcccaattaaggcaataatcataataattgattggtcaggaaccgttggtatgaatgctccttgaaacaattcgcctaaaggaggtttggcgacaaccatcgtcgtcacaaaggtgatgctcataatcacaacaaggacaatcattagtttttcgacaagcttatagctgccgctcaagcctaatcctaagatgacgattccgaaaagaggcgcaagcacgtttggcgatatccccgtaagcgtcgagatgcccatagacgtaccaagcaaatcgccggccatataggctgatgacccaactaaaatcgcgactaagacaaggaacatcgacgcatatttgagcagcggatgtgtaaaatgctcacgaatcgctgcgcctagccctttttgggtaataatgccgaggcgggcactcatttcttgtaagatgattgtggcaataatcgaaaaaatgacggcccaaagaagggcgaagccaaaggaagctcctgcccttgtcgcagttgtaactgtgccaggaccaatgaaggaggctgtaacaatcgcccctggacctatcgctttcaatttgtttttaaacattgatgttttcatgttagtcggttcttgttgtttctccattcgttccctcttttctggcgtttatccttccgccctcgattgttctaaatagttataaatcgtttgcttcgatacgcctaaaatgtccgcaatccgctccacggaaccttgaatgagaaaagaacccttttcgtcaagctgctggacgaaatacatcttttcccgtttgcccatttcttcaattggcacgccaatttccatcagtgtatttttaataagcgtctcaaaaatttcttcaatgttttccgcgtaggattcatcggtcacagggctcggctggcccaaataaggggcagccgaaaactcactaagaacctcacaaacgttagaaaaggcagtgatgtcatagttaattccaaaaaagccgatgactttgcccgtgtcattgcgaataaacgaaatcgacgaccttaacgttcggcaatctttcgttcggctcgtaaagcccagtttatctggcacctcatcgccgtactttcttaattctcttaacaccacttcagtcgtcggggcaccgtgttttcttcctgtcactgtgcctttaatataaaacaaagaagattgaacgttcgtcaaatcatggataaccgcttcacaatttttcccaaacgttgcgacaatcatatctgcaattggaatgtatttcctcagtataattttattgtccactttccacccacctattctcattaacgtgggcttctcccccactatttaggatgataccatgtttttctcgttccatatgtgtcctgcaagcgcatagagaacgactgtagaagccaagtgggcggaaaattggcttggatcttgttgtgggtacacttcgacaaaatccattccaacgactccttgtttgcaaatttcatggacaaaagtcaacaactcataagaactgaggccatttccgtctacaggaccgccaggattgaacgcgtagtcgagcacgtcgctacaaatgcttaaatacacttcatcgacatcttggctcgctagcttgtacatatgagccgcatatccttttaagtcacgctgttcacgtatgtcattaatggtgatcgtgacagctccagcctcttttgcatttctgccgctttctggtttgttgcgcgggccatgaatgccggcatggacgatgctttcattgcgcaccccttctaattcatacaagcgtttaaatgggctgcaccgagcaaacggatcgccttcgtggtggggaaggttatcataatgggcatctaagtggataatgcctacttttttcccctcgttagcaagcgctttaacaatcggataggtgaccccatggtctcctcctaagccaataagaaacgtgccttttttccaaaactcagcggcaaaccgctcaatccgcctcatcgtttcatcgacatccgctggaacgacatccacatcgccagcgtcaccgaggcgaatatgctcaaatacatcaatatggtccaattcaggcagatagccgctataacgagccgagcaaagcctcattactttcgggccaagttcacagcctgtataatcaccccatgtgaccgccccttcccaaggaattccgtaaacaacggcatcaatcccttcagtggacttcgatttggcgatattttttgcatttagaaaacaaggcgtattgccatatagtttctccatcaaatccccctctttttctacaagatgattagatatcaaaatggtaatgatttttttacaattagtcaatttatttttattaaaagtcaaaaattctatgtcaaatcatcttccatacctaatgccggatttccgtacaaaaagtgaagcaaacgactgtacatgtcatttgccgctctgtttgttataatgaagccgtatgaagaacgtcgtttcataaatggaaaaaattttatacaggagtaaaaaaatgaaaacgatatcgattttaattgcagatgatgaggaggaaattgctgacctgcttgctattcacttagaaaaagaaggatacagtgtagcaaaagcagcagatggacaagaagcgattcacattgtcgaaacgcagcccatcgatttacttatattggatattatgatgccgaaaatggatggctatgaggtaacccggcgcattcgtgaaacgcataatatgccgatcatttttttgagtgcgaaaacgtccgattttgacaaagtacatggactggttatcggggcagatgattatataacgaaaccgttcacgccgattgaattggttgcccgtgtgaatgcccaactccgccgtttcatgaagttaaatcagcctcgtccagcggttgatcctaaaacacggttagactatcgcgggttagttatttctcttgagcaacgtacagtcactctatacggagaaaacattgaacttactccgaaagagtttgatattttatatttattagcaagtcacccaaagaaagtgtttagtgtggaaaatattttcaagcaagtatgggaagaagcctattttgaaggggcgaataccgttatggttcatatacggacactgcggaaaaagcttgaagaagataaacggaaagataagtggattaagactgtttggggagttgggtatgcattcaatggctaaaatgatgcgtagttttcgtgctaaaatggtggccttatttggattaagcatgtttttatcagcagtgatcacatacgtactctttaaaggattgcagttctattatcacaccggggttgaatacggggatccggttacgcacattcgtaactggataggtggattcggcgactttaacatcttttttgttttgttcatttccctttctttcctgtttttctttctcctgacaaaaccctattcgatctatttcaatgacatttcaaacggcattcgccacctcgcccgcggcgactttagccacaccgtcgatatccagtcaaatgatgaatttaaagatattgcaaaagacataaatttggccagtaaaacattgcaagaggcgattcaacggggagacttttccgaaagtagcaaagatcaattagttgtcaatttagctcatgatttgcggacaccccttacctctgttctcggttatttggatttgctcctaaaagacgaacagttaacgaaagaacaagttagacattatttaaccattgcctttacgaaatccacacatttagaaagactaattgatgaattatttgagattacgaaaatgaactacggcatgcttacagttgataaaaccacaatcgatttaactggcctccttcaccaattaaaagaagaactgtatcctatacttgaaaaaaatcacctaacggcccggatgaattgtgagcccgatttacttatgagtggggatggtgatttgttagcacgtgtatttgaaaatttgctgacgaatgcgatccgttatggtagcgatggtcagtatattgatgtcaacggctttatcgatgaaagcggcgaggtcgttgttcaaatagtcaattatggcagcagcattgctgcagaggagcttcctcatctctttgatatgttctatattggcgataaagcacgaaccgatagagaaaatcggacaggtcttggtttatttattgctaagaatatcgtcgagcagcatcatggatcgattgcggtggaaagcaatgtcatacagactacttttgaagtgcgtttgcctaaagaggacgactcggtttaagaaaaatttaatatttaccctacttcttttttaaatacttttacctatgctttaagcgaagacacgaaaaatagcttaggtgaaaggtagagattgtatgggaaaggctccaacgttcgtaaagatttccgtcattataatgattatactcgtggcattatttaaagtcgcagataaaggaaccagcggtgtaaaagagtcttttcctttctttcgtacggacgaatacgtcagtccatacatttttgtgatggagcgagaaacagggcgtgtcgtttatgaagaaaatgccgaggctaaagtatatcctgcatcgcttacaaagatcatgaccaccattgtcgcccttgaacagattgaggatctatctgccattgcccctgtcgatgtaactacgtaccacgaaatggttgctagcaatgcttccatggccggtttttttggcagggaggacgtaacgtaccgtgaccttttatatggcacgatgttaacatcaggtggagaagcagcaaactcgttagcggttcatgtagggggaaatgtggaaaattttgtgcagatgatgaatgacaaggctgctgaacttggattgaatggcacgcacttcacaaatccagaaggtcttcacaatgaaaagcaatatacgaccgcttctgatatggccaagcttttagactatgccttaaacaacagtgatttcaagactatttttacaacaaagatgtttcaaacaacgccaaccgccgaacatcctgatggcctcttactacaatccactgttctcacattcctccataaaaaagagcaagataggtttgacattcttggtggaaaatcgggcaccacctacgaagcaggacaatgctgggccacacttggcttggtcgaagatactgaatatataacgatcgtgatgggggctcccttaaaagacattagccatccagatcgggcccaaatcgccgatacgctcaaattgtatcgaaaaatcgagtctagtgaataaagtgattgcagctgaaacggctgcaagtcgcttgtaagagaaaagccaagtcatgtgattcactgacttggttttttcttctgtccgatttggcagttgaaaacagcgctgccgcgtccctacatatcgattgaaaacgtttcttttaagccttgttttccttcgtctgtaatttgaatcgctcttgttttcggcaaacgttgtacccaatttaactcgatgaacctttctagcaatgcattccccaatgctccagcaagatggtggcgcctttcactccagtctaaacatttgtgtgaaaaggaacggcgttttttcctggcgttttccaggttaatttgaaaagcttgaaagaattcctctcctgattcagtaacgacaaagccgtccttgtcttcacgaatgacattcatgttgagcaaagaatcggttactttcactcctaaagcgccggcgaggtggtcatagcacgttcttgccgaacggattgctttgtcttgagaggcttgattgaacgacttgattttttgtggcggcgcaatcgataaaagcgactccattatttttgcgatttctggatcttgaatcccatagtaccggtgtctcccctgtttttcgacaacaatgacatgggcttcgaccatttttgctaaatggaagctcgctgtttgtggcttgatgcctgccatataggccaactcacttgcgggatggaaacgaccgtctaataaggcggttaatatcgccgcacgagaaggttcgcttacaagcgaggcaacgatggcgacatttggattggcattcatttgaacactccctcatgtaatcgatatttcgattataatggaagtatttatattctacaatcgactaggaaggacaacagaggaggaacaaatgaatggaacaagcagctcaacgcattcatacaaaaacaattaatccgagcattttatactacggaacgcccgtcgttttattaacgacactgaatgaggacgaaaccgtcaatattagtccgatctcgtcttcatgggcattaggagactgtctcgtgttgggccttggacttgggggaaaagcgattgaaaatatagaacgccatcctgaatgtgtcttaaatataccaagcccttccttatgggaaaatgtcgaacggttggctccgctaactggaaaacagcccgttccagaaggcaagaaacaacttggatttacgtataaaaaagacaagtatggcagtagtggcttaacgcccgctccgtctgaaggagtaaaaccgacacggattttagagtgcccgcttcaaattgaagcaacggtgaaacacattcgcattccagcgcattcgcccgattttgcgattgtcgaaacacaagcagtacatgtacatgctcataaagaaatcgtgcttggcgaaaaccatattgacccaagtaaatggagcccgctcatttataatttccgccattattttggcttaggcgaacaactggcaaaaacgtaccgggcggaaacatgagtatgctttgtgattcggatcatcaaataaagcccgattttctcttaaacgagagtaaaatcgggcttttcgttgtctcacgcttcgctaacaagttcatcatagtacatctgttttttcaacagaatgaacggcgatcgcagcaatgcaaagtcctacaactgccaatgtgaacggaatgtaaataatagtagcaattgaaaagcctgggttgtaagagctaattagggcgacaatgatgatcgacgatacaatcgttgctggcactgatttttggcgcatcccaaaatacaaagggattaagcttgtgcctgcggcagctaatgcatacatgcccgtactgcccaccttttcaattagcatcgcgaaagtgacggtttggtcaacgacttgcaggactgagtttccgagccacaatgcagcgctgacaacaaggtcagagcctaaaattgtcacgaacgtaagcaaaaacacaagcgccagttttgccgaaagcagttttttccgctgcacaggcaatgcaaataaaatattgatcgtcttgtttttatattcctcaatcaccagctttgccagcagcacagccgcaaacacaataaacacggcacggacaaacaagccactaataaaaaatccttcttccagcgtataaaaaggaatgtcttcgacctcaaacttgcccataaacataagggcataaacggtgaccacgattagaaaattggcgacaatcgctcctttccaataccaacctaagcttgctttctttaattctagttttagtaaatgatacatggctttcactcttcttcctgtgctttttcttggtcaagcacttgatggaaatattcttctaacgatttgtattttttgctgatcgcttcaatttcaacatgatggtcgagcatcgcctgtgtgatttcgttttgcctatgaccggcctcatagacgcgaatcgtattgttgtagagtgctttgaaattgcttaactgcagcacgtcttccaacacaaagcatgcttgtttttgattcttggtcaaaatttcgatatattctgtattttcctctttgagcgctttcagagagatttcctgaagccattttccgtttttgataacgccgatacggtcagcaaatagctcgacttcgctaagcaaatggctggaaacaatcaatgtcgttccatattcttggctcatcatttgaaacatctctctcactgttttaatgcctgaggggtccagcccattcatcggctcatccaaaatcaatagttccggtttgactaacatcgcccgggcaatgccgagccgttgtttcatccccagagaaaacgtatggacaggtttgtgttggacttgctccaattcgacccattccagcacttcgtttatggcgtttggatcgtaatagcccatgtactcagacaccaattgcaagttttgccgtgctgttttcttttcataaaaagtagggtattcgatcatgctgccaacacggcttaaatactgataagacgaagcctttattggctctccaaacatgtcaattgtcccgtaactcggttttactagattggtcagcattttcataatcacggttttccctgaaccattggggccgagtagcccataaatttcccctttccgcacactcatcgttacatttgagaccacttcgtgcccggctatgaattttgtcacatcgtgtaaacgtacaatctcctccactatgttcctccttctgatcacttgattcgtttattagtatagaacatcgatttgtcttttttctttatcctttcttacaaatttattaaccggcttttttagggagtggtcttacctgatttttttgaacgtgcaacgaaagatcgttttctgataaggagtactgatcgctgttattgtccctttcatggcgacgacgaggcgcttcgtgatgcttagtccaagcccgctgccgtggaaggctgggtttctagcgtcatccaacgtatacatgcgctcaaatatccgctcttgttctgtttcgggaatgcctttccctttatcccaaacgtcaatgaccgcttgtccctcttcttccgttaccgacaggccaaagacattgccttcatacccataacgaatcgcattcgcgatcaaattgctcaatacccgttcgagcccttctttattgccttgaatgtaaatcggcttctcgggtatgtcgatttgtacatccattcctgttgaagccaaccactcataatggtcaagcacgctttggcggcaaacttcatttaattccattctgcttaatggcaacagctcatcgcctgcttctagctttgctaaagcaaagaacttattcatttgcgaaatcacctgttctgttttctcatgaaggcggccaatgattcgcattcgttcttgttcaggcatttctcggtctagttccagcttttcaatgtaagcaatcatcaccgtcaatggtgtttttaaatcatgtgaaatattggccaacatttcacgttgttccagtttggctttatagtaatgagccacttgttgttgattcaaagcgagtaatcggttgatttgcgcaagtacaagttggagttccttttcatctgtcgccacaagcaatttgccgcttgtttcctggtcaacgagcgctttaagcttttcttcgatagcaagcaaactttctttcgcttttctttgccgatagaaatgccagcctatcataaacacaagcgctagggcgaagacgaccgttgccacactcattgtggtgctcctagtttataaccgattccccaaaccgtttcgataatctcaggtttggacggattggtttcaattttttcccgcaaacgcctaatatggacattgatgacgttctcttcaccaagatacggttcattccaaatttgttgataaagccgttcctttgtaaacacgcgctttgggttttccataaatacgtgcagcaactgaaactcttttgccgtcagcttcaccgcttgcccgtttttataagccataaacgcatctacatccaagcggatgcctccgcgatgaaggactcgttcttccttagcgtccgctactgtgtagtcggtagcacgcctgatcgctgcctgtacccgagctgtcaattcaatgagcgaaaacggtttggcgatgtaatcatctgccccaaaccctagcccaagcgctttatctaaatcgcttcctttcgcggaaagaatcaaaatcggcacagaactatgtacacggatttgctttaaaagcgtcattccgttcattttcggcaacattaaatcgagcaatactaaatccacgccgccatttgcaaacaatcgggccgcctcttctccatcggctgctgtcaatacccgatatccttcattctctaaatgcgcttttactaaatcgctaatttctggatcgtcctcaacgagcaggatttgcttcactggtaaaaccccctcttgcaaaagtttaccacgggcacctgccctgctcaacttgttggaaaagcggctgtctcttttaagaaagtttattatatgctaatacgaagcgtacacctgtttttaacatagaaaaaggtgaagggcatccgcccttcaccttttcgtgttgcttatgctgcctttttccttctaaggaaccagagaatggctccaagaacgagtaggcttgcaccaatgagaagcaaattgtacgtgcttgtcgctgttttcggcaacttgcttccatctgacggcgacttgtctcctggtgtcggctcttgaggtttgttcgtgccgccattacctggttttggctcttctggcttatcgccaggagtcggatcgactggatcttctttgtctccatcgccaggtgttggtggtgctggtggttcggtaatttcgatttctgcttcaggtttgtctggatcgtcaatgttgccgccatttacagttgcaacgtttttaatcgatgttccagactcaatggttgcttcaaatgtgaccgtacgccattccgtgtcagtaatagtgccaaattcagctgtaactgtaccgtcttcgaaagtggctgtaccgccttcacttacttgtaggctgccttcaacgaatgctaagccttctggaagttggtcgatgatcgttaagtcttctacggcactgtcttcaaccgtgttgcgcgcttcgatcgtatatacgaccgtgtcgccgacttcgtaaccgtctttgctctcatctgcatttttcgctgactttttcgattcaagcttcggctctttcggatcaacgtctacttcgtgttctggcttgtctggatcgtcgatgttaccgccacctacggttgcaacgttcttgactgttttgttcgcaaaacctggttcaattgttgcttcaaacgtgaccgtgcgccattcggtgtcttcgacattgccgaattcggctgtaacggtgccgtcttcataggaaccttcgccaccttcgcttactttcaggctgccttcaacaaatgctaagccttctggaagctggtcagtgatgcgcaagtcttcgactaagctatcttcgactgtgttgcgcgcttcaatcgtgtacacaaccgtgtcgccgacttcatagccgtctttgctttcgtccgcgtttttcgctgattttttcgactcgagcttcggttgtttcggatcgacatcaacatctgtgcttggctcatctggctcgtcgatatttggcacttcaacgactgcgacgtttttgatcgtctcgcctacatagccagcatcaattgttgcttcaaacgtaactgtgcgccattcggtgtctttgacttcgccgaactcagccgttaccgttccgtcttcaaagtttcctgtaccgctatggcttacttccaagctgccttccacaaacgttaccccttctggaagaacgtccgtaatggtgaggttttcgagcaagctgtcttcaaccgtgttgcgcgcttcaatcgtgtacacaaccgtgtcgccaacttcatagcggtctttgctttcgtccgcgtttgttgctgattttcttgactcaagctttggctcacgtgggtagatttcgacatcttcacgtggctcatctgggtcgtcgatattgtcgccatcgacaacggctgtattctcaatatctttccctgcttgacctggcaacacaaccacgtcaaatacgagtgtatgccattctgtgtcttcaacattgccgaagtggcccactactttgccgtcgacatagtggccttgatcgtcgtcttcctcatccgttacggcttctccgttcactttcagtgttcctggaacatattccagtccttctggaaggacgtcagagatagtgagatttgcgatcaagctgtcttcgattgtattgcgtgtttgaatcgtataccgaagtgtgtcgcccacttctgggttgtcctcatcggtattgccgtctgctttttcaagcagtgctgccgatttttctgattccgtttttggctttttcggatcgacatcgacatctgtgcttggctcgtctggatcgtcgatgtttggtacttcaacgagtgcgacgttttcgatcgtctcgcctacataaccagagttgatcgttgcttcaaacgtaaccgtacgccagtcattgtctttaacttcaccaaattcagccgtgaccttgccgtcttcatagctgcctgtgccgccatgactgacttccaaacttccttcaacaaacgtcaacccttctggaaggacgtcgctgatttttaagttttcaagcaagctgtcttcgaccgtgttgcgtgattggatcgtatacacaaccgtgtcgccgacttcatagccgtctttgctttcatcagcatttgttgctgattttctcgattctgtttttggctcttttggatcgacatcaatgtcggttcctggctcgtctggctcgtcgatgttcggtacttcaacgagtgcgacgttttcgatcgtctcgcccacatagccagaatcgattgttgcttcaaatgtaactgtgcgccattcggtgtctgtgacttcgccgaattcagccgttgccttgccgtcttcaaagttgcctataccgccatggctgacttccaagctgccttcgacaaacgtcagaccttctggaagaacgtccgtaatggtgaggttttcgagcaagctatcttcaacggtattgcgcgcttcgatcgtatacacgaccgtgtcgccgacttcatagcgctctttgctttcatctgcgttttgagccgattttcttgactcaagcttaggctctttcggatcgacatcaatatcggttcctggctcgtctggctcgtcgatatttggtacttcaacgagtgcgacgttttcgatcgtctcgcctacataaccagggttgatcgttgcttcaaacgtaaccgtacgccattcggtgtctttgacttcaccgaactcagcggttaccttgccgtcttcatagttgcctgtaccgccatggctgacttccaagctgccttccacaaacgttagcccttctggaagaacgtccgtgatggtgaggttttcgagcaagctgtcttcaacagtattgcgcgcttcgatcgtatacacaaccgtatcgccgacttcatagccgtctttgctttcatctgcgtttgtggctgattttcttgattctagctttggctcacgtggatagatttcgacatcttcacgtggctcatctgggtcgtcgatattgtcgccatcgacaacggctgtattctcaatatctttccctgcttgacctggcaacacaaccacgtcaaatacgagtgtgtgccattctgtatcttcgacattgccgaagtggcctaccactgtgccatcgacatagtgaccttgatcgtcatcttcctcatctgttacggcttctccgttcactttcagcgttcctggcacatactccagtccttctggaatgacgtcagagatggtgaggttttcgatcaagctatcttcgattgtattgcgtgtttgaatcgtataccgaagtgtgtcgcccacttctgggttgtcctcatcggtattgccgtctgctttttcaagcagtgctgccgatttttctgattcaagctttggctctttcggatcgacatcaatttccgttcctggctcatctggctcgtcaatatttggtacttcaacgagtgcgacgttttcgatcgtctcgcctacataaccagagtcgatcgttgcttcaaacgtaaccgtgcgccattcggtgtctgtgacttcgccgaactcagccgttaccgtgccgttttcaaaactgcctgtgccaccatggctgacttccaagctgccttcgacaaacgttagcccttctggaagttggtccgtgatgatgaggttttcaaacaagctatcagagactgtgttccgtgcttcaatcgtgtacacaaccgtgtcgccgacttcatagccgtctttgctttcgtctgcgtttgtggctgattttcttgactcaagctttggctcacgtgggtagattttgacttcttcttgcggacgatctggctcgtccaaattgtcgccatcgacaacggctgtattctcaatgtcttcccctgcttgacctggcaatacgaccacatcaaattcaagggtatgccattctgtatcttcgacattgccgaactggcctaccactgtgccatcgacatagtgaccttgatcgtcatcttcctcatcagtgaccgcttcgccattgactttcagcgtgcccggtacgtattccaagccttctggaatcacgtcagagatggtgaggttttcgatcaagctatcttcgatcgtgttacgtgtttgaatcgtataccgaagtgtgtcgcccacttctgggttgtcctcatcggtattgccttctgccttttcaattaggcttgcagctttctcagactctaacactggctcttttggatcgacatcaatttctgtttctggctcgtctggctcgtcaatatttggcacttcgacgacggcaacgtttttaatcgtctcgcctgaatagcctgtgtcaatcgttgcttcaaacgtaactgtgcgccattcggtgtctgcgacttcaccgaagtctgctgttacggtaccgtcttcaaagcttcctgtgccaccatggctgacttccaaactgccttccacaaacgttagcccttctggaaggacatctgtgatggtaaggttttcaagcaagctatcagagaccgtgttgcgggattcaatcgtgtatacaactgtatcgccgacttcatagcgctctttgttttcatccgcattttgtgcagattttcttgactctagctttggctcacgtgggtagattttgacttcttcacgtggctcatctggctcatcgagattatcgccatcaacgaccgcgacgttttcgatgtccttgccagcttgaccttcgccaacgatgacttggaattcaagcgtttgccactcggtgttcgttacgtcacggaaggaaccaaacgcttcgccaccaacgtaatggccttcgtcgtcatcttcttcatcggtaaccgcttctccgttcactttcagcgttcctggtacatactctagtccttctggaatcacgtcgaaaatgacaaagttttcaacaatgcttccttcaagtgtattacgggcctgaattgtgtaaagaagcgtatcgccgacttctgggttgtcagcatcggtgttgccatctgctttttcgagcagtgttgcatttttctctgattcgattactggtttttgatacacaatcggtgtttccacttcattggtatcggttgttttttcctcatctacgagtaagtctttgtagccaatgtgtgcttggttgacgacaacgtcattggcatggctcgcaagtgtctttactttgaattggacagtgatgccgtctggcaaatcggtcgtatttggcaggtcgccaagttggatgatgaccttatcaccgtcaaaatggccagcatcgtcaccgtctgcatcggttaaatcaccagcatttggtccagtaaggattttaattgaacctggtacatattcggttccttctggaatcgcatcttcaaagacagcgttagccgcaatgtccccacccgtgtttttcactgtaacttcataggtaagctcatcgccaacagacacttctccttcaggagaaactgttttttcagcttctacacatggctccgttccaaggaaaatatcatctaggaagttacctgctcctaagctgccgcttgcagtagaaacggcttcaaacccgaaacgagttacggtttgtccggctggaacggtatacgttccagtgtacgtcccccacgcagtgtttccatccgacatttgttcgatgatttccgtatcataagggtcgtcggttgcttggccgatgcgaagttgcatcgtatcaacaccgtggcgtcccatatgtgacaaacgccattggatcgtttggccaggagttgtcgctacatcttgatacaacaacccgttgtcaaacgcatttaattcggcatagcggacaccatcaggtggagcagggaagtttattactccttgtgggtactgccgttcataattccaaatttcaataattttgacgccttggctatcatccgttgtctgccagcctggtacctcttcctctaagaagaaatacggagcagtatacgagccctcagtaggcccttgttcaaaactaccgttgatcaaggcaactggtgcggcacaagcgtcaatttcttccctttcaatgataggattcgacacttcattcgtctcagtcgttttgtcttcatcggtcaacaaatttttgtagcctacggtagctttgttgacaaccgtctcgccgacgtggctggacaacgttttaactttaaactggacggtaatgccatcttcaaggttcgttgtatttggcaagtcgccaatgttgataatgactttgtcgccatcaaaatgaccaccatcgtcatcgtcctcatcggtcaaattcccttctttaggaccgttcaaaattttcattgatcctggaacatactcggtaccttcaggaatggcgtcttcaatcaccgtatccgccgcaatgtctccaccattgttttttactgtaacttcataggtgagctgatcgccttcaaatacctctccttctggagaaacggatttttcagcaacgacacatggttctgtacctaggaaaacattatcaaggtaattaccgaaagccaaagcgccagtcgatgtactaatggctttaaatccaaaacgcgtcactgtttggcctgctggaaccgtataactccctgaatacgtttcccatacactcccagttgaaattcgctctatttctggcgtggtgttgaatggatcgggcgtaaccggtccaatattcacactcatcgtatccacaccagtatatgatctgtgatctaagcgccaataaatcgtctgccctggtacggtcggcaattcttgatacaacatactatgtgtatcagcatttaattctgcaaatctactcgttagattctctagattctcagcatttgaaggtatcgtgctcggccgggcagggtccatgatttgaataatccctcttggtgtacgggcgacatcagtcgtttcccaccctggaaccgtgtctgcatagtaataaccgcctcctgctatcgcgttatcataggtaccaggtccctccggcaaatcaaactcaccattcactaatgccactggctgtgcacatgcatcaatgtctggtgtttccacaatttcatttgtgacttcattcgattgagccgactgctcttcatccgtttgcaagttgcgatactggatgtcagcttggttcacaaccgtttcacctacgtgactttccaatgttttcacctggaattgcacggtaacaccatctggcaagtccgttgtcgtttccaaattgccgagttcaacaatgactctgtcaccatcaaaatggccagcatcgtcatcttcttcgtcggttaaatcgcctgtgtttggcccagcgacaattttcaaagagccaggaacgtattccgtacctgctggaatcgcatcttcaaaaacagcatcggctgcaatatgctcaccaacatttttaatcgtcacgtcgtatgtgaggatattgcctgcaaacacttctccctctggtgagaccgttttttcggcttcaacaacgggaccttcacgtggataaacctcaacgagctcgctcggttcctgcggatcgtcgacattgttaccgtcggctaaagcggtattttcaatgtctctgcctgcttggcctggcaatacgatgacattaaattctactgtatgccagtctgtgtcggcgacatcgccgaagttgccaactactccgccatccacataatggccttcgtcgtcatcttcatcatcggtgaccgcttctccatcaacttgcaatgtgcctgccacatattccaagccttctggaatcgtgtcggagatgaccatgctttgtactaagctatcggataccgtattacgagcttgaatcgtatagcgtagtgtatctcctacttctgcatgctcttcatctgtgtttccttcccctttttccaacacttccactgattttctagcttccaactcaggtggaagggggtcgaaaacaggatagacgcgtgaagctaaatcataaactaatgcgcctgtatcagagccgatgtatgttgtttgaagtgtagaagcgctgagtacaaaatagcttggtccagttgaattcgaaccacttgatatcagcatgtcaccgttaggtaagaagctgaaacctcgtactcctacataatcagaaacattcaccccatctgaactggtaacagggacacttcgtaaaacttcccctgtagttggatcgacttgataaatcatatcagcatgaagtgaagtaaaccatgcgtatccattgctatcaataaccaaatctgctgcacgatcagaatcgacacccttcatttcaacagaagaatgctctccggtatttaaatcatatgaaccaatatagtacgttccatcttcatttgtgcccatataataatacgtcgtgccgtcttgcgagataacgccattgtcaagtagtggcggtaagctcgtcacagcttcagcaacaccatcaggagtaattttataaagcatatactcatcattagcagacaagccatatgcataaaagacatcctcatccattgcgacagctaatccgttagaaatgtgaccgccactagggactccggtgatcggtactctagccacaggagttgagctagggttggttccactatattgataaatataagcgtttggcctttcccaagctattccataagaatctgtatcattaatgtctaaaacgttactaacttggacttcttcactttcagtatcttctgtagattgcccttcttctgaaacttgttcctcttccgaagactcttcaccagcgttttcctcttcttgctgggcttcttcttcagtagtctcttcttccgcaggggcttcagcatcagctaaaagcgcgactgttacgggttctgctttctcggctaattcgccgttgatgaatgcttctgccacatgttcgatttctgtgcctgcttctacttcatcttgaaaagcagcggtaatcttcagagtgacatgttggccagcgactgtgtccagttgttctggcgtaagctcaagactgacatcttgttcttctacagttgcctccaaatcgctttcttcttcattcacaacgacttccacattctcaatcgctagttgtttattgacttgattaagaatcgttaacgttccctcattcgatccgctttctgggatcaacgcatcgacattgaacgtaaaggtggcgcctttttcaacttccttgcgctcttccccatcgacatcttgtttgagttcaagatcagaaagggaaggcgtttcattcgcttgcgcatattgcgccgagtaaggaaggaagttgctaagcgaaagcaagaaaaccatcgtaacaatgacgagttttcttaattccagaagtcttctcctggtcaatagttttttcgattgcaacgtattcgcaccttctttttttagtcttctaacaccttctttttctgaaaatttatttggtcaccatggccatcacccccttaaaaggatgtgtttgctggtacgatgtttgatcaggcttcatcctccagtggatatgcataaatgacaaaccgttctggagcgttgccaataaagtggaatgggtagcaggtgctgaccactaggacttcttctcccattttgcggatcaccgacgtatcgtcttctggcacgatttcggtataagcgatttcataggtaaacgttccataaggcatttcaacaatgagtgcgtctcctatttctaattgatcgaaattgcggaaaacggtatcgcgatgtcccgacaaaacaatttgttcatcctgcccaggtaaagcggtctcaggcaagtggccaacgccagcatccaatgaatcaggatcagccccttcaacgatgggaagcgttctttcaagctttggaatctccaatgtcgcaaacgcctcgccttgtttagcggaaaaaccttctgacgacgctttttcgccaatccgcgcctgtgcttccgtcaatgactgttgttcagctttgtgttggctgtataactcgaaagcgaaccaccctagaaaaatgaggcctgccagaagaaataaggaacccagttttcgcatatatggccctccaatttttttatcctaattgcaactattaataatttgaaaataaagcaattgttttatttagataaaatgggtaaaaaaaggtgacatctataaatatatcaatctattttttaatttaattcggttatagaagcaagtcaagagttctgaacaatcaaacaactatagcctcttttaattacgttcgcatggattatttggatatttataccaattaccaggtattattagtattattaactgattttttatgcctatttttttgtcattattcatctatcttcgtttgttcataaaaactataaatctactacaactgaaatgattttaggctacatatcagtggttcttggtttggcaattaaccgctttaacggcttgaagagagtaggatttttttccttcatgttatctattttttcccaactacccttcgcaagtgcagaaattttgtcataggactaataggattttaagtgaaagaacaagaataagctgataaagaaatcgccctccaatcaatatacgaatggaaaaacgctgtattcgggacattcgatagaaaaatgaatgggtcgatgtatgtaattgccgattaaattcgttcaccaaaccaattcacaagacttgcagcacatatgcaagatttttgttatgagtgacttagaccgatgtataggcatcatcactactagcaccataaccgctgctcagcatcatttttgttaaacggagaatcaggattaagcccggcatagacttagcgtcttttctgcgtttctacgtctctgccagcttgattgataaatgagaggctatactcttaaaaaaatgggggatttcatgaaaacattgtcggacaacattttaattgaggcgtgtaaaaatgcaatcaagcttaaccttgatccagactttattcatcttttactcaaggaatgtcaacgtcgaaacatttccatttcacaccacttgaatggcaacgaccgtcaagtactagataaaacatggagtgaaaaggaagaggattctacatatgaacgtttttaatcaatagacaagtctattccgattgactcttaagtatagactggcgatgcttccatgttctgaaattaaaatagatcatgatcactggaaaaaattcgttataaaatttgtatcaatgttatatacatattcatgaaagttgtaacaacctaaatgttttaaggaggactgtatggttaaagaaaaatggatgaaatgttgtcgcgccgtcttgttacaaacagtcgtgtttgggttgcttgcttttgcaggagtccaagttgcttccgctcatgggtacattgaaagtcctagctcccgtgggctcctttgccagcaagggatcaatcaggattgtggagcgattgtttgggaaccacaaagcttggaagcgccaaaaggatttccagggcagagcgttccagatggccaaattgcctcagcaggtggcttgttcccaaaactggatgagcaaagctcaactcgttggtcaaaagtgccgcttacaagtgggacacatacatttacttggcacttaacagccatgcattcgacagcaaagtggcattattacatcacaaaaccagactggaaccccaatcagccattaactcgtgatcaatttgtacttattcccttttatgagagacatgacaatggggcgagaccaggtgagaaggtcactcacgaagtaacgattcctgagcgtacaggataccatgtgattttaggtgtctgggatgtagcagatacagccaatgcgttttacaatgtgattgacgtacattttggtcctaacgatggcacttcgcctggcgaaccaagcccccctgaccctgcgccggcctatccagagtggaatgcaggtactgtttatctcggtggtgatcgcgtcacctacgaaggccgtgcctatgaagcaagatggtggacccaaggtgaaaggccagggactgccgaagtatggcgccccctttaaccgcacaggaaatgatctttggaagaaaaatgggactactagtgaataaaaatctgctgtatttgagtaaataggtggttgtagtgattttaatctgtctttaaaacaacatccccctccttgtttggccacatgccaaagcaaagagggggattctagttaacttaaaacatcacttgcccgccggtaacgttgatcgattgaccagtcatataggcggctttgtctgaactatagaaaacgacagcattggcaacatcttcatacgtgcagcccctccttaggggcactttgtcgatgtagacttgttcgacttcgctttctttgatgccaagttttttcgcataggaagggattaaactttggaacatcggcgacgacaggagattccctggcataatcgcattgacacggatgttgtgctctgctaaatccaacgccaagctttgcgtgaggccgacgccgccgaatttggaagcggaataggcaacattatgtttgcttccgacttttcctgactttgaattaatttgaatgatgttgccgctgttttgtttgatcatgattttgcttgcttctctagcgcagtaaaaatagcctgtcaaattaacgtctagtgccatttgccaatcttttgtcgggaaatgatcaattttggcgctgcgggccacgcctgcgttgtagacgagcaaatcaagagatccgaacgtattggccgccgtctccatcacataagcaacctcgtcttctaccgtagcgtcaaagccaattccaagtgttttgcttcccgtttgattagcaatcttttcggcgacggcttcggctctgctcccttgcagatcagcgacaacgacatgatagccttcttgtgctaatcgccagctaatatgttctcctaaattttggccgcccccggcgacaacagctgttttttttgtttctgccatgatatctccactcctttatttatctagaaattgtaatggtgtctccttcttttagtagtggcagcggctttgcttcgagtgacaaagtccctggcaattccgcttccttcgccccatcggcttttatcgttatatgcccgagggcgcgtaaatttttttcaaccgcactgccaacggctgtaaccacaaacgcttgtcctgctaaaattgccgtatcgcctggttggatgttgtctattacttggttttcctgatgaaggacacaatactccgctaactcttctggcgcattgtttttaaacaaaatcaatatattctctgccaaaaaatcgctagcaagagtgcctaactttgttacagttgttttgtaaatcatcgtaaatttccaccttttcgctttactttcccttttgcaaaagtagtgattgcttgttaagcacgttttagcgttctcccgctatctgttatccatcgtacatgccgaaactggctagccaagcaacaaagacagttggcgggccggttaagaaccttccatacagaacggcaggaacaccgacttcgaccgtttcaggttctgcctcagctaagccaagccctactgggacaaagtctgcagctgcttgggcattaatcgcaaatagagcaggcagcgcaaactggggcggaatgttgcctctgccaatttcgacgccgattagcgtgccgatcacttgggcaatgaccgctcctggaccgagaaaaggagacagcaacggaaaagatacaatcgctgataaaattaacagtccccaaatcgtaccgccaagtggctttaagacattggcgatgacatcgcctacgccagaagctaaaatcaagccaattaagagcgacacaaacgccataaacggcaagattgtctttaagacggtatcaatcgcttcacggccagcttggtaaaacacattgacgatgccgcccatcatttttccaatcttcgccattaagttgtcgttttgctcggttatttttttgcttgtgtcataggttgcttgttttgtagcggcactttcttcagttgctctgctttgttcttgttgatgtccctctttgtcgacgatcgtcaaatggcttggtttcacaccagatacataaatatcggggacgatgaatttggccattggcccgctttggccagtcggcataatattgatcgtcggaattcgtttttttggatacagtccggcccggagcgtcccgccacagtcaatgacaactgctgcgatttgttcttctggcacagaagtcgtaaacccattgacaagctcagccccgctaagttccgacaactttgcagccacatcggaaacgggcccgcctgtaatgttgacgatcttatttttttcaggtgttggcgtaatctcaagcggtcctccaaatccgcctgtcccttttacgactcgaacggttttaaaatcagccattgcgaacacctcctaacgattcgctcatagacgttttcaacttgactttctgctgcttttctacatacgcaaccatccaatcggtcacaagcccacggaacatattcatgacgacaccgacgagaaaataccgtagcgctagctcagcggtggagtggcctaattgcgtaattccggcagcaacgccaagaaagacaaatagttcggccgggttgacatggggaaacaacccgttcatcgagtggcaagaatagctggctgacgcataatagccaggcttgtaccgttctggtaaaaaacgccctaatgacaacgtcatcggattgaggaagaaaaaagtgccaataacaggcaggactaaataccgggtaaagatgttttttgctgatttcatcgccaatttttcaattcgttcttgcccgacaaattggacgaccgcattcatcgcgacaagcagcataattaaaagtgggacgatatcaccgactaatccaacaaatgtggatgctccttctgcaaataaaccgataaagcgttcggccatttttacgagccaatccattagctactcacctcacgctttcttttaaataccgccaaaagttggctaagcggggctttcggcggttttacttccccgccggccttaacgacgcgatagacatgttttgcgtccgccaacgcttttctcgtaaaggggtccaaccgcctttctaccccttggtcgacgtaaaacaacggctgcccttttaatgacggcaattccttaaacctggcaaaaatcgtcattccttgcatccgttcagcacgaataatattcgctttacggtctactaacaacagcaagatcacgccagtacggatgattccttttgagcggccaatcgccacttggccttcttgccgaaaggagcgatagcggttgttaaaatgcttgatttgccaaaaaccaagtacactttgcaacaggaaaccgactccgagacagacaattgctagcaaaattgccattactaattctccttccacttaataagttcgatcgctgtttcttcatctgtgatcaagtgggaaatatagcctccctgcaaaccgcctatgatcgaaggtactttttctttcgattcggcgatcgcgactgtggcccggttttcctttaaacgatctagctcgaccgcaatcgtccgttctcttataggcgtttgcacttctttgccatcaatcgtgtaaaaacgggaaagaatatcgccaatcgcttgttttttcgcaagcagctgctgttcggcttcgccaataaaaccgctccaaaccaaattggatgaacggacgtgggcaccaatgccaatgacagcgacggtcatttcctcccaaagttttaaaacgtcttgcaagtaagccgattcgcgaatgtctttttgcgcgtcggctgacgtcacaatagccgcagcatcgatatactgtgctttgcctttaaaggcacgggcaaaattgtagacaatcgtattgatatgatgcttgacgtgcatcttgccaggaccgcctacgattggcacaaaaacggtgtcacgctttcgaaaagaaccaatcgtttcagccatcgttccaagggtatctccccatgcaagaccgatgacatcgccatcaacgaggaggctgtcgagcaaattcgctcccgattcccctaatgcttttaggcgctcttctctgctcgcgtgacggtctaccgggacaatcacagcctcgcgaatgccgaacatgcgcgccaactttgcttccaaatcaacgcgaagacgctgtgtgctggcaatttttatttgcacaattcctgcctcccgtgctttttgcagcattcttgtcaccgttgtccggtaaaggcctagccgtttagcaatttcattttgcgtaagcgcttcctcatagtacatttttgcgacaatgactagttggcgttcctcttgccacttcatgcctgtttgttcaccttctttcgtttgcacatatgtgcaacactcgctcatatgtggttgatagatcgaatataaccgctttcatttcattatgcaattcgatttggcaaatggaataaaattcaaattcgatttgcacatttgtgttcttctttagtaagaaagcgcaaaaaaaagaaggcgcggtcgccttctttattatccttctatcattttgaacagatcgccattcaacaagccatatgcgcaatcagcaaccttctcgctataacggcttaaatcacggccccatagttcgtctgcttgcagcaatgtggaaatcgtttctgctaatgtcgcttcacccgcatcatactggccccatgtcgcttctagtagtgcgagtgctgtttcattttcacggatttgataggttctgccttgccagtttccttttagaaacgcgccatctctttcctgtggcttcatatagacaagcaacgctgcgaggctcgctaacaactggttcggctcgttgtcttgctgttcatgggcctctaatgctggcagcagccgtgtcttaaatttgtagatcgcatttaaaccaatgtcggtcagcttgtgtgccaaaaacggattttcaaaccgctctatcacgctagccgcataggcttgcttttcttcctccggcgcgttgacaacggggatcagttcttgttcgagccctcgttcaataaagcgccgcaagcgcggagagtgaagggcgcctttgaccgtgtcttctcctgctaaaaagctgagcgcgaacatcatcgtgtgcaatccgtttaagagccttacttttagctcccgatgcaacgccacaggttcccatttgacattgagccctgcttgctcgaacggcaaacgctcgtctagcgggcgctctggttcgatcacgaacaaatggtacggttcagcgactgtcaacaggcggtcttcgtagccgagcctgtttgcccacgtttcttcttcaccatggggaaagcctgttacaattcgatcgacgagcgtgttgcaaaagacattcgcttttcttagccattgcccaaattcaatcggcaactcccagtcttcggcaatcgtttcaacaatgtcttttaacacagcgccattgtcttcgattaactcacaaggcacgagtgtgatccctgcctcgagagcaccagcgaacgctaaaaagcgttcatataaaaaggcagtcaccttgcctgggaaagacagtggcgctttgtccttttcatatcgttcctgttgatagacaaggcctgcttctgtcgtattggaaaacaaccattttacatcaggagagcgcgctaattttttgacttcttcccagtcattgtaagggttaatgcctcgggcaatcgattggactacttcggcttcatcaatgactttgccgtcgagtttgcctcgtaaaatcacggtgtacaggccatcctgtgcttgaaggacagggacgattttgccgtgtggcgtcggctgtatcgccgcgacgcggccatcatacagccgttgctggtgaagttggtcgaccatccaatcgatgaaaccgcgcatgaagttgccttccccgatttgaacgattgtttccttgcctgcaggcgtctcttggccaacgagcttttttgtcaattgctttgtttctattcgatccatgctgtcactccttttataaaatgacgccgtctttgaacagggcgatttctttaaagccattccgttcattatgagtcgcccgttcccctgaggcaatttgcagcacataggcaaacagttcgtccgcaagctcgccaagttctttcccgtcaaggagtgtgcctgcattaaaatcaatccagtttttcttccgttcatacagaggtgtattcgtcgatagcttgacagtgggaacagggccgccaaatggtgtaccgcgccctgttgtaaacaagacaatatgggcccctgaagcggcaagggcggtgacggaaacaaggtcattccctggcccttccacgagtgttagccctggctttttgattctgccgccgtaagggacgacatcggctactggggcaaaaccgcctttttgcacacagccgagtgacttctcttcaagggtggtaatgccgccttttttattgcccggggaagggttttcataaacaggctggttatggcggataaaatagtctttaaagccattgaccatgttgacaatgccgttaaaaaccgtttcatctgcagctcgttccatcaaaattgtttctgcgccaaacatttcaggcacttctgtcagcactgttgacccgccttgggcaatgagccgatcggaaaatgcgccgacaagtggattggctgtaatccctgaaaagccgtcagagcctccacattttaagcccacttttaattttgacgccggcacgtctgtccgcacatcgtttttagcgacagcagcgatttcagaaacaagctgaagggcttcctccagttcgtcttctacttcttggacacctagaaacttgacgcggtcgctgtcgtaagcgccaacggcctctttaaacacgtcaatatagttgttttcgcagccaaggccaagcacaaggacacctgccgcattagggtggtggactaagctgctcaggattgcttgcgtgctttttaaatcgtcgcctagctgggaacagccaaaaggatgtggataatggtagacgccatcaatattggcaaaatgctcttgttgggcgaggcgggcaacgagctcagccgttttattaatgcagccgaccgtatttaaaatccaaatttcattgcgtatgccgacatcgccgtttttgcggacgtatcctttaaacgtaaaagcgggcgtccctttgtctgcgtctgccgtggctgcgctttggctttgcttgtattcatacgccaacttgccgtctagagcagtctttaagttgtgtgtatggacccactcccctgtggcaatcgcctgtttggcaatgccaatcggaaagccgtattttaacaccggttccccttcgcgaatgtcgcggagggccactttgtggccacgttcgactggttctgctagctcgagctgctgttggcccacgctaatgacgtcgcctttagctgcctcttttaacacgataaggacatcgtcttttgggtggatctttacgccgtccacagcctatacctcctctttattggcgagcaacgtttcaattcgaatcggcgcgccctgtttcgccgacttccacaccgcttcgccgacagcgaccgagagcgcccctgcttctgccccggcgaggacgtcgaatggccgtgtaggatcttctcctaaaaacaagtcttcttggatcaccgggtcgccgccgccatggccgccctctttttggacgacatggatcgtttctttcgctccgaatagcggaaataagtcaatcgtttgttctggcacaggaaatggcgtccgcgacggcgcatggtattcctgcgtctcaattcgtccgtttgtgccattgatcgccaagcggtagccttcatacggaagcgagaagttgatcgaataactgagcaatgcaccgccatcgtagcggacattggcgacatacgtatcttcaatgttaatttcttcatcaaacacacaggcgtcgggacgatagcctgtgtacgcgccaaggtcctgccctgccattaaatggtcgtcttttatttgcgtcaattggttgcggccaaaccagcgcctgtaatacgaacaattttgccggtcgctgcacgtcccgcaatggcggccattttcccgccgtgggtttaattcgctgtttgccccgtaatagtgcaggtcgccaaaggcaaacacttcttgggggcgctggctaatccaccaattaacgaggtcaaaatggtgcgtcgacttatggacagacaaaccgccagaaaaagcgcggtttcggttccagcgtttaaagtaactcgatccgtggtacgtatcgatataccaatttaagtcaatcgacgttatacggccaattcgccctgattggattaattccttaattttgatgtggtacgggttgtaacgatagttaaacgcgacagtgacctttcctttgctcgccttttccgcttcgaggacacgcctcgcatcttcgcttgttgtcaccatcggcttctcgctaattatgttgagccctaacgccaagccgcgtaaaatgtaatccacatgtgtatcatcgcggcttgcgacaacggccatcgtcgcgttcgtttctttgaccatttgttcaaattggtccggccggtaaaacgtggcattggccagtgtaggatacgtttgcaaacaaacttcatgccgtttcgggtcaatatcaagcaaagcgacaatttcattgtcatgatgaaaacgagcaataagcggttcaacgaacatcttaagcgccctgttgctcaggccgcaaatcacgactctttccatttgacactccttctggctccttttcggaagaagccttttgctgagaaagctgtaatcgtttcatcgagcggaaaatccgctcggctacccaagaaatgacataagcgacgcttgctgcgccaaaaaacaaaatcaaacctggcatcgacataaacaaaaattgcaggccgtacaaggaggcgcctaacaaaatcacatgcaagggatggccgcaactaatgagcagtgcagcgcggatacggttcaagccttttaaatcaaaaccgacatacgtaggaaaatagagcaatagcatgctgctgtacagcaccgacacaatcagcaataagccacgaacgaccaccatcgcgagcccagggccagcaaacagtgtaaaattccagtacaggagaaaaccgacaaggaacaaagcaagcgctgcgccgttggcgcgccaaaattcctgtttgtacgtttgccaaaacgttttgaaaacaggcacctcttcccattggccgttcacccatccccgggtgacggcaaacaaagcgaccgtcgctggagccgcgccgaacaagccaagcccgagcaccgtaagaccgagccagagagcgtttccataagccagtttggaaataaatacagatacacggtaaaagctaccccacattcccgttaactccacgttgttctccctcctgccatttttcgacttgcttttttgcctttgcttgcttatcgctataaacaggcaggacaaggacggcttcatggtcgagggcgaagcttgtggcaagcacgctgtcaacagacactgcgactgtcgtctcttctccctttaattggacaggaacgccgtccattccttctaatgaaacgagcccttctggatcgattgcctctgttaggctgccatccacaagcaaaatgtcagcttcgtggcctgccaactcaacgacaagcctttctaaaacgcttggaaacaccgtcagccttgcttcggcttcattgacgagttcatgcaactggtcttgctgttgatagagcacgtcagagaaggccatcacatggaggcgatcgtcatctgcttgtttgccgcatcctgctaacacgatcaaaacgatggcagcaaagcaaacaaatcgccggttcatcggtgcttccgtcctttttcgatttccgtacaagcgagtgcaaaggcgccgacgccatgcaagtcattggcgctcgtcggccggctaatgtaatcgtcgtaacggccgattgacgtaccgatgcaaatcatttttaaaacgagcgcgccgtcctcttctatgtcaaccgcatagtccaacaagcctgaaagccctttttcagcatggaagaacgcgtcttcgccaagcaaccctaggcggtagccttttgccaaagcataaacaaacaggctcgtgcaggagctttctagccagttatcaggctggttgcctttgtcgacgacttgataccagagccctgtttgttcgtcttggtacgtgaggaggcgggccattaaagactggaacgcgctttctaacacagggcgtttcatatgattctcgccaagcaagtcaattaagtcggcaagcgccattgcataccagccaagagcacggccccaaacttcctctgtcttgcctgtttctttgtcgcagacagctacttgtttgcttgcgtcccaagcatggacatacagacctgtcgcttcgtctttcgtatggttgcgcatcagctcttcttgcttcaggacaagatcgatcaattcaggctcattaaattgttgcccgtattggacggcaaatgggccagccatatataggccgtcgagccacatttggttcgggtatttgtccttatgccaaaagccgccaaagcggttgcggtttaacgtatggagcaaacctcggagtttgcgggctgcttcttggtagcgatactcacctgtacgcctaaacagcggcaaaagcaaaagtccagcttgaatcgcgtctaactcatcgcggcgaaacaggaagttgccgtcttcatcaattaaggcatcgacgtagtctttcacgtactgaaagtaggcttcgttgtgatccatttcccaaatccggtgaaccccgcataaaaacacgccttgatggtaatgccagcggttggctggcggcatttcaaccggctcgtacttgctcataatcgcctcacacgccttttttccccactctaacggctgttggctccgtactttcgcgaatgatgtcatgtcgattcccccttgtattcaaaccaatcaaatgcggctgtcgttgtgctgttttgtccgttgcttgtcgcaaacatgccaatataggtgccgacaaagccccctgctcgatctgtgctcaatagcctgctatcttgcttattagcgaccatgcgccacttgccacctggcacacggtatgaaaacgaaagttcttgcaaatcggcggcaacttgccattcaatcgccgttgccggaatcggcgccgtgcttttacctgccaccgtttccacgccatcttccacttttacgagccgtataaacaactgcccactacgtataagttcaaagcggtaatggtttttctggctgtaaaataaagcaagtccagcagcctcgccgctttgcttaggatcgaattccataaaagcgcggacagtaaacgatcgatgttgctggcggcgcccgataaaacttggatttgcctcgtcagaaagcatttccgggcgaacgtttaactgtaaataccctttcctcgcttcaagggaataaaacggcgtccgcggcgtgcggatcatattccattgaaagcctagcttgcgagcgttaaaatcatcccgggccggcaatggttccaccttttgccgcggcaaagacgggcctggcatctcgacttcgattttccctgtctcaggacaaacaacaggccaatcgtcctcccagcgcataggcgctaaaaacgtctcacgccccatattgcggtacatgcccccatatggacgggaacctaaacagacaagccaccattcatcgtcctgcgtcttgacgatatcggcgtggccaatattcgtgatcggatagtcctggccgagatggcggtgtgtcagtactgggttgcgcctgttcgcctcataagggccggcaatctcccggcttcgcgcaactgtcaccgcatgggtgaacccagttccgccttcagcgataaacaaataatagtagccgtcttttttataaagatggggtgcttcctgggcatgggctatttttaacgcaccatcccaaatcccaatcggttcgccaagaagccggcctgtaatgggatcgatttcctggagccaaatttccatatgcttggcgtgcgtttgccctgttggaggaacacggttgcctgtgtaatagacacggccatcatcatcaaagaataaggatgggtcaatgcctggcgcccctgttatccagatcgggtctgaccaaggtccagccgggtcttttgccgtcacaaagaaattgcgtcttgccccgtgttggctttccacaaatgtggtgatcatataaaatagtccattattgtaacggatcgtcggcgcataaatgccccgtgaattcggggtaccatcaagattgagctgctctggacgatctaacacatggccaatctgtttccaattgacaagatctcttgaatgaaaaatcggcacgccagggaaatattcaaatgtagacgtgactaaataatagtcttcgtttaccctgcaaatcgacgggtcaggataaaaccctggaatgatcggattgttaaacggttccacgttgttgtttctcctttcccaattcgttacaaagccacgggatcgcttttgttccgttgactttgtggcctccggcaaaaaattcggcttctccccatttgctttcatgcaatgcttgctttaccgattcagacgggaacagatgatcgtcgctgccgctttcaataaacagtgccctcggcttaatcagttcaaacaattgcggcgtctcgccgatcgtgagcaagccaggaatatagttgtctaggcaatggcgtgaagctaaaatgctgtcgcgcatgagactagcgaaaccgctcagtacggttgctttgatccgctcatctgttgctgccaacaacagcgcaatcaaggccccacctgaaaaaccgatacagccaacgttgccacggcgcgtttcgcctacccaatcaagcaagcgggcgcattcaaacacgcgcaggccagcaagtgttttgccgtaaagaagcaagtgagaggcaatggaaaaacaactgttctgctccgcttgatcttgctttcgtttccgggcgccaaagccggcgagctcaggcaacacaacaactgccccttgctcaacaagctttaaggcaaaagcgttatggctcgaatcttcctgcaacgcttcttctgcgcctgcgccatggccatgcaatgcgagcacaaccgtctccttgttgccgccaacaggctcgaataaacggaacggcaattttagttctgccgttgttggaagcacgtaagcgctctccgtaaacgaagggtgttgccgcttataaaggcatgtcgcctcaagcatcgtcgctttcgggaaatcgcccatcgcttcgcgcaatgctgccaatcgctcgtctttacaagtgatggtgccaacctcttgccggtagagcccttgcaagtaatcatcgatttctgccataggcttaccctttcattgagccaattaaggcgcccttggcaaaatatttttgcaagaatggataaacgagcaaaacaggaatcgttgcgacaacgatcaccgccattttgacgctaatttccggtggcggaacgcttgtatattcagaaccatcgtagttcaacccagttgctaagacgacaatttgccgcaacaatacttgcacaggccacttatcagggtcatttatataaagaatcgcatgcatgtaagtgttccagtaggtgacggcataaaacaaggaaatcgtcgcgatggccggcaacgagcacgggatgacaatccgaaacagcacgccgaaatcgctacacccatcaatttttgccgattcctctagcccgctcggcaaattcataaagaagctccgcaaaataatcatgttaaacgcgttaatcgttacaggtacgataagagctagcaatgaatcaattagccctgtttgctggacaacgagaaatgtcgggatcatgccgccgttgaacaacatcgtaaagacgataaaaaacatgagaaaacgccggccgactaaatctctccgcgacaagccataggcggttaaaacggacaacagcatgctccacaccgtaccgcctaacgtgacgccgatggaaacgcccatggagcgcagaagcgtgtctgttgaaaaaatatagcgataggcgtctagactaaattgtgttgggaacagcaaaaagctgcgttgggcaatttcagcgcctgtcgcaaacgagctgccgatgacatgaataaacggcaaaatgcaaagcaaggcaatgatgcctagaatgatgatattggtcgcattaaaaatgcggcttgataacgatttatcgccaaccataaaacaaacgccccctttcctagtaaattccttcttctccgtatctcttcgccagccagttggccatcacaacaagaattaagccaacaacccctttaaaaaagccaacggcggtactgtagctaaattggccttgcctcaatccggccgtataaacataagtgtcgaaaatttccgccacttcgcggttggacgcatttaacagcaaatagacatgttcaaatcctaattcaagcacatcgccgattttcaaaatgagcaagacgatgatgacactgcgaatcgctggcagcgtaatatgccacatttgccggaaacggttggcgccatccatttttgccgcttcgtataactggggatcgactgcagcaatcgctgctaagaaaatgattgtgccccagccagcctcgcgccaaataatttgcaaaatgtacattggccgaaaccattcagggttgagcaagaaattgatttggtcaaactggagcgctcgcaaaatgttgttcacaatcccgccatcaagcgtcagcatgacatagctgattgaaacgatgacaacccacgacataaaatggggaatgtaaatcatcgtctgaatgctgcgttggtacgcgcggctccgcaattcattgagcataagcgccagtatgattggcactggaaacgaaatacacacttgcaacgcaaagagaacgagcgtatttttaaagatcatccaaaagtcgggatcggaaaacagccggcggaaatggtccaatccgacccactcgcttccagtgatgccgagatacggtttataatcttgaaacgcaatgattaatccatacatgggaatatatttatagacaaaaaaatagagaagacccggtgcaatcattaaataaatccatttgttctttttgattttgcgccatagttcctggcgcctttctgcttttgtccgggtccattttttatttgccattatcgggctgtccatggcacacctctttcattgaatataaagggaggcaagcctccgcccgattaatcgggcggaagcttgccagccctttcagtctggatgattgctgcttattgctggttgtatgactcgttgtactcgctgatcatgtcatcgccgccttggcttctccacgtttcaactgcttgctcaaagccagcgaggtcggtttgtccaaggatatactggtacgttgcatcgtttataatttgctgcaaacgttcgccatgtgtttgcgccgttggcgaatgaagcgtcgttgtcgggtcgtgaaccaaataagactcgttatcgatttcgagttcatcggcctttaatttgactggataatggctttgccctaagtagcgtccattggtttcagcttcgccgatttcaatcgattggtacggtttgacttcgcgctccgtccgctgcgtatcctcaatcgcaacggctttgccgtcttcaatagtgtagtgctcgtcttcgatgccccagtaaatcaagtttgcgttctccggctccatgagctggtcatagaaagaaagaatgctttttaactcttcttccgtttgtacggctgatttcgggaatatcaccaaattgccgtaacctggaatcgcccaaatgttgtattcgccatctggcccttcgacatagttatggacatcaaattctaaatcaggattgatttgcgacgcttctgaatacagcgtcaatacgtcgcccatcgagcctacataaatgcccgctgttccattttttaagagcgcttgttggtctggcttgcttgtaaccggaaagtctttgttcatgtatccgttttcatgaagttctttaaaaaagtctaacgtatcgatatactcatcaaacataaattctggcaaaagctcgccgtctttttcgccccatccatttggcgtcccatgccaagatgccactgttttaaaggccccataaatgaggtcgttccggtctgttaagccaatcgtatcgtcgcggccattgccatcagggtcgtcttctgtaaaagcgcgcgccatttctgcaaactcttcaatcgttgttggcgcctcaagaccaaggttgtcagcccagtctttgcgatagatgatgcctgaacgggctaacggacggccttggtagagcgcatatacttttccatcaaccattgtattttcaacgacttctggctttagttttttcaaattctcgaattcctctaaataagggccaatttcccaaaattgcccatcgcgaatcgcatctttaaactggtcataggttgtttggtttttcatataaacagcttgtggcaacgtccctgtcgcaaacgcggtatttaaccgttcttcataattgctgtctggcacccattgaatgtcgagctctgtgtttgttgcctcttctaataaatgttggacttctttttctggtacttctgctgtatgcaaattagccatgattgtaaatgtaaacgggccttcttcagccgaagtcttttccccttctgaggaagcgctttcattttcgccgcatcctgcgattgctactaaactaacgcccacgctcaatgctgcacacatttgtttccaacttgccatttgtaaacccccacctttttgttcattttttctccgcttcccacctgcttgttttttggctgcagccttttttctctgcttcccatattagcgaggcgccgcatttttttgaataatcatttgcccataatcccagcagcaatccacgatttgcgcctcacctaacaaaatgattactgccgttatgggcctgttttttgcttataacgtcattttaattgtttttgttgcctgtattggcctggcgtcattccagtcatttttttgaacgagcggataaagttttgcgagttgttgtaaccaagcttttcggcaatcgttttgactggttctgatgtcttcgccaaccattcctttgcttttttcaagcgatattgggccaaatattcactaaacgtcattgccgtgccttctttaaacacgctgctcaagtaattggcattgtaatgcaaatcagctgcgcattgttcaagcgttaccgcttggtggtaatgctggtggatgtagtggatcattttttctgataagtgttggaactgggattcgctcacttgtttgaaggctgatagcaatgggtcaatcaggcgactgacaaaccaatttttcatttgctcttggctaggaatcgttaagcactcttgataaagggtgccttctggcaagagcacgccttgatcgtggcgcaatccgctttgttggtaaagttgcagcattcggttgagcaaccgcataaaggaaacacggacttcaccgagatgatgggctccttcgctaacctctgccagcaagtggttaaacaagtcatacgcttgtttatcatcggcaagacggagcgctagcaacaattcttcttccaagtgttcaggatactggaacatactcgacttttctttcgcttggatgctttcgtaattaataatgacgttatcgacaaatttaagccgatgggtgagtgcttcttttgcttctttataggcggtgctcgtctgggccatgtttgtaaatggggcgctaatgccaatgctgacatcggcttctaagtaatggtgcataaatgatttaagccgttcactccattggtaaatgactgatttcccttgttcttggctatctgtttctaaaccgataaacaggacaagcagctggtcgacccacacggcgggaagacggtattcatcgggaatggtgtcctcagcgacattgagcatcgcaaacgtaagcaaatccatttcctgttggtcttcttctttttgagtttgctcgtaatggacaacgagcaaactgtaggaatgccactttgccattcggctgtcgagcccataaagtttgagccgttcttgcctttctgcttccgagaaatggccttggtacaaacgcattaaaaatagcgtcattgactgtttcgcatggatgcttagttcttgttccagcatcgactttgatgagaaaagctcttgcagtgtatcttcaataacttgaaactccgtccgccttttcccagttggcacgccgttctccttttgcgtgactgcggcaacaagcttttgcacaggcaaatacaatttgcgtgagaacagccatacaacgagtgctgacaacaaaatgatcgcaagcacaacataaaacgtaaaccagccaatgctttttgtttcagccattaattcgtccattggtgtaaccgagacatatttccaacctgtaaatgtagaagaggaataggtaatggcaaatggctcttgatctcggtcaaccgtaaactggccggctgcctccgttgtccacactggttctgaaaagcctaattcagctaatgtttttccgactgcctgctcatcagagtggacaatgacacggttatgttcgtctaaaatcatcagctcgtcgtccacttcatctccgccgatcatttcttggatcgtacacatcgggatattggcaaagacaagcccaaatttctcactagcacgcgctggcaatttttttataagactgagactatacggacaattacgccgtatgatcggctctgtaaaagaatcattggctatcaatttccatgtcgtatcatacggcaaatcaaaaaaagtcaaatagcgttcataatctacgtggctgtctaggcgccgaatgccctgattggtggcaagccaattctggtccttgtttaacacaatcgtttcctctacttttgtatcaaatgattgcagtttgctgagctccgtccgcaagtctcggtaaacgagaaaatcctcgccatctaaagacgtgcgaatggctgcttccatcgtcggcgactcaatcgtattatttaaagaatggtggacggttgtcagcaccgtttcaatatttgcctggacttgtctcatcaattgcaacttttcattttcaaccctttgttcggcctggttcgttgactggatataagcaaacacgccaacgacaataaccggtatggtgctcagcaggccgccatatagcagcaatttcatccacatgctacgctgcaatcaaaacaccccttttctgcatatatgaaagcgcttaaatttctgataaagtgaaagataccgagcaggtcacccataaagaaaggagtttgattatggaccgattggccatttctgtccgaagccgctctatttatgtagattacaactgcaagataaaaccaccgtttgatatgaaccattaccatctccataacgattttgagtttcattggctggaagaaggcgagcgtttgttcatgtccaaaaacggctcgatcttgttaaagaagcacacccttttaattatttcaccccacttcatccatagaatgaaagccgctcctgtacccgaacatgcccgttatgtcgttaatttccaaccagcggtcctctcaaacgagttaaaaaaactggctaaaccgctgctgtcccctgcctttacggttttgcaaattccgcaaaagcgggcagatgagtttaatcagctttttatgcagcttcttaaagagtacaacagtcctgcgacgaaggatagccttctttatcagcaatcgctcctgtcacagctgttaatcgaaagcaaacgggcgcttgattttacgctgcacatggagcaacagccgttgccagctctttccgaacaaacacgcgtggcatcacagctaattcagcacatcgaacagcattaccaagagcggttagaccttaatcgacttgcctctcatgtccacttaagcccttcatacgtaagccggctattcaaacatgtcacaggtactcgtttaagcgagtacattcaaaaagtccgtattgcagaggcttgcaaactgttggaagagtcgagcttgcctgttaaaatcgtctgccagagagcaggctttgccagccttgaacattttcatcgcgtctttaaacgtataatggcggtttcgccgattcaataccgtcattcctatttgcacaaaaataggcaatctttaggtggcagataaacaaaatgagtcaattcttctttgttatgctaaaggcaacttaacgaaaggaggatggtccttttttgaaagcgcttaaacgaatgtccaagtttgctatttttggattatgtgctggctttttcgttatgctgacatccactgctgctgcagaagaagcaacggtttccaacgaaacgatcattaaacaagcgaaccatctgttgacttggcaaatggaccatggcggctggtcgaaagacatgccgcaaatgtatacgcgagactggaacggcagggaagcgaaatcggtttggacttcaaatggacaagaacttgggacgattgacaatgatgccaccgtctctgaaattcgcgttgtggccgaagcgtaccaactgacaaaagacgaacgctttaaagcgagcgtccacaacggcattgattttctttataaactccaatatccgagcggcggctttcgccaagtgtacccgcaacgaggcagcgatccgtccagttccgtctggtactccaattatgtcacttttaacgaccatgcgatggtcaacgtcctccgtttactggaagacgcccgccaaggaaaagcgccatttgaaggcgacttattcaatgattcacagcgcaaacaaatggccgcatccattgagggcggattggattatattttacaagcccaaattgtcgcaaacggcaagaaaacagcctggggccaacaacatgaccctgtgacgctacaaccacagcaaggacgtgcttatgagcatccttcaattgcaacagatgaatcggtaggcattgtccaatggctggaagaccagccaaaccaatcagctgcggtccaagaagcgattgctgcagcgcgggcgtggatggatgaagctcgtgtcgctgatacacgctacgagcgccgcgttgagccccattttttctatgagcctggggcagagatttggtatcgtttttatcaaatcggcaccaaccgcccgattttttcagggcgtgatggcgtcatccaccatgacattatgaacgttgaacaagaacggcgttatggctatgcttgggctggcacgtggccgcataaacttcgttaaacgttggttttaggttgtcgtttggctacagtcaaggactttcacaacgttggaagtccttgacctatctagcccattacatttcctgactgtttaaaggagaaagaaaaagcgaccttccgaatgaagaatcgcttcttagccaaacgtatacgcttcttttcgcgcttccacaaattcatcttttgttaatccaaacagaattaaatctacatattgtccgtccatgtagactacttgtcgacgaaccccttcttgaatacagcccagtttttccatcattttaacagaaccttcatttccttcgagaacacagtcattaaatttgtgaagtcttcgttcaaaaaaagcatattttaaaagaatgttcatggcgcttgtaccgtatccctttccccggtactgtttatcaatgatgatcccaatactaaatgtcccatttctctcatcaatacggtttaaatttatactgcctatattgttgccttcttcattttcgatcgtaaacatgattcttccctttgttgacgcaaaattggcatgttcctccgcgaacgtttgagaacctgaaacagtaggaggcaactcaatcgcacatgctaaaaaacgacgagcaggcgtatcaaacttactaaggtagtctgcttgccaatcttcaggttgcatcgcacgcaatctaactttatcgtcttgccaaaaataatggctatcatctactttttgtaaaatatcttccatattcataaccccttcattctatctgtttcctatactatcttatcattcatcgtctatcatgccattctttttaaaaaaagctgcccaactagacacgcggcctttttggacaaccctatttcctcccctactcctttttgctagcttttccgccaaaccctagctcctgataagcgtttaatgtgctccacggtttatgacgattgttagaaacgccgtaatacgtcccgtagtttttgtctgtttcgatcgatgcttgaacgagcgccactaagtcttcatcggcaagcaacgtccgctcaagccggtcattcggctgttttcgtttttcggctggtggaacagaggcaatccgcaagttgatgacagatagcttgccttctttggcaaacaaataacctagctgttcggaggcaaatttcagcacgccataaaggctgttcgttttcggaaaatcgtcaacggtaatttcccgtggcaataaagagtagccgtctttttcgtaaccatccgtgacgtggttgctgctcgcaaacacgacccggcgaatgccttttgtttgtgctgccaataacagataataactggcattgaaaaacagcgccgtcatctcgtcaaaatgcgctttgctgtcaatgccctttgttgactcgatccgcaacaaattgacaattgtatctgtgtcatcaggaagcgtttctaagagcccgtcaaaatcaacagcatccccttcaataaaagccacattgtcgtctggcttttgcacgtccataatgacgatttcatacttgtcctttagccctttcgcaagaatagcaccaaccgttcctgccccgcctactaaaacgatctttttcaccaccgcgccctccttctcattcggcaaactcgtgcctcttagtgattattaccgttttcttcctaacattaaccattgttttgaaatgtataggattggcctttttccgccttaaacgcataaagcttgcctgcatcaatcgccattcgttccccgttttcagtcgtactcatcgcattcgggaagacgacgacgcatgcattctcgcaactggcatagacggtacaagcaagaacgctgctgttttgccattcgaggtcaatcgtaaaaccacctcggcatctgactcctgtaatggcgccttgtttccaacgacggggaagagccggcaacaaccggataaacccttcatgggactggacgagcgtttcaatcactccggcaacaaagccaaagttgccatctatttggaaaggtgggtgggcggaaaacaaattcgggtagacgccgccgctttcatgctgttcatcgccttcgcgcactagttgcatagaacgagaaatgagcgcatctgtccgatccccgtcaagaaaccgcgcccataaacagagcttccacgccaaactccagccagtccctccgtcgcctcgttcgcttaacgatttcttcgctgcttggtagcgtttttgttggtggttgctgctccactggctgcctgggtagacaccatacaaatgagaaagatggcgatggtgcatgtcttctcctggaaagccatgcgtccactcttgcaacgcgccttcagcgcttaacggcggctttttcaactgatttaaagcatctttcacatcggtggccaactgttggtccccgccaactagctcgttggccgctaaaaaaaggtgaaagacatcttccagtaaggcaagatccatcacagcgccttctgatactgggtaaggctggcctttgtacaaaaagcgatgctctggcgaagtcgacgggctcgtataaacggcgccgctttcatcttgaacgagccaatcgaggcaaaataatacggcgcctttcatgactggataggcgcgctccgttaaataggcacgatcggctgaaaacaaataatgctcccacaaatggcgcgtcagccacggagcggccattggccaaaaagcccagacaggatcgccgccaccaaaaccgccgactggctctgcctgccgccaaatgtcgctattatggtgcgctgtccagcccctacattggtagtaatttttggcgacggcttttccttgctcggacagctcttcgataaacgttaaaaaaggctgatggcattctggcaaagcggcggtttctgccggccaatagttcatttgtgcattaatgtttaatgtataattgctgctccatggcggtcgaatatgttcattccatattccttgaagattggctgcctctgtcccctcccttgagctggcaataaggagataacggcccatttgaaagagcagctcaacgagcttaccatcattggcgccgtacttggcgaggcgttcgcttgtggaaagcttctctcgttccgtttcgttaagcgtaaacgtcatccgttgaaaaagggattgatagtcttgcaaatgccggctctgcaacgtctcgtacgtgctcgtaaccgtttcgctaaggcgtttgcgaatgagcgtgattggctctttgccttggggtgcctgtgctgacgcaaaactagtttccatatgaacgagcaccgttgcataacgggcatcctcaacaacgagtttgttgttcttaaccgctgcgttcccgtctgtttcgagcaattgtaccgcactagcaaaccggatcgccgacgatgtttcatagcttgtgtaacggatcggctctgaagacgggacatagttaggggctacatattctgggcaccagcctgctaggccgacatggtcctgatcgggccatccaatcgtacgcaatggcgatgttagccacgccgaaaaagatagcggcagctcggcaacagcctctaaacgcaaaatgatggcctcgtcaggcttactagcaaaaacgcttcttttgtataactcgtcttccaccgtcaccgttgccgtttccaactgaagcgtccgttcataacgagtgcttgaatgcatacgcaaaggaaacaatatatgcaaatcgccgagtggcaaatacgattgcgtgtatggaccttgcatgtcttttgcgtatcgacttgccgcttgaaagtctcttgcggcaatggctgcgcgcatgtccgctactgttcctttcacaggggcttggttccttttagcaggcggccctgaccaaaggctatccacgtttaaagcgattttttcgtgttccacaccaccataaaccatcgcccctatccgcccatttccaatcggataagcctcggtccacgtttgcgctggttgctgttcggtcagttgcatctgttcttcctccttctgtatatcgattaaaaaaagaacctgcttgccgcaggttctcagactgtagccaaacgacgtcgtctcagccgatgtgttgtggtcagccagtgtgattgttagtcattccacaattcaacgcgtgtgcgcacaagttccgtgtattctttttcggcttcttcgacgccagctccttcaagctcggccataaactcatcccaaacttgatcaaattcctctggagttgctaaaatcgcttcagggactttgcgtttgacaatatccaggcaacgctgcatgatcacattcaaatcggaggaagaatcaactggaatgttgtaagcagctccccatggcttaactggaaattcgtcttcttgtgggtataagtctttccacatttcaacgccatagttgcttaaaacttctttttccacttctgtataggaatcgatgatttgttctgtattggcgattgtaaatgtttgccctgtcgaatcttccacgccatcgccgtaagctggagcaaagccctttaagacgccaatacccgtttcctttacgtagttggcattgtgattccgttcctccatttcttctggagggatgacacgtttgccatcgacaatttcatagtgttctccttccaatccccagttttgcaggatttgtccttcttctgaagcgaggtaatccagaaattgaatcgccttgactgggtcttcattgtcgacggatatgccgatgccccagccgccaagataccctgtatcttggaaattagggtgcttgtattcttccgttaacgttacaggatacatgccgtacatccgttcatgtttgcctgcttctcgcaatgccctttccgcatcgtcgacttgccaatcggcatcaatgagcccgagcacacgccctgatgagattttctctaaatattggtcgtatttttgcacgaagctttctgggtcgagtaaaccgctgtcattcatatggttcagccagcggaaatattccttttcttccgcacggcggtaatgcatcgtcgcttcataggtgtccgggtcaatatagaactcaccgtcatctggagctccagttgcatagaaagccggatttgtggtcgatatcataatccgccaatcatcagccaataacgacaaaccgagcgtcggctggccatcaattgtcgggttttcttccatgtaagcacggatcgcgtcttcaaagtctttgaccgtccgaatgtccggataaccgagttcttttacgacttcatgctggagcataaagccgttgccaggttcccaatacgtatggtcgattggcgcagtaggtaaaatgtaaatgctctcgtcttcttcgctccatttcaggcggttaaaatagtcgccatacgctttctttaaattcggcccgtgctcttcgatcaagtctgtcaagtcgataaaagcgccagcgttgacaagtgtgctcgcagagccttttggcaaaatgaaatctgggtaatcgccactcgccgccattaaggcaattttttgctcgcctccattgacatcaaattcaggctgcaacgtaacgcctgtttcttccatcactttttggcttacagggctttccatgttgtcccactgggagtgaggatcggcgctaaacaacgtaaaagtaaccgggctatcgtctgattcattgctcgcatcatcgctcgtgcaccctgccattcccagtgccaccataaccgctccagcgatggttgatgcccttaccacgcttcttttctccatgtcttcttccccctttttactatttagctttttacagcaccgagcgtcatgccttggacgaaaaagcgctgtaaaaatgggtaaaccaataaaattggcacgaccgtcaccatcgaaatcgccattttaatcgactcaggtgagaccgtttgtgcagcttgttcgccgcttatgctgcggtaagcgttggcatcgccagaaccgcccatcgtcgtattttgcaagattttcatcagttcatactgcaatgttgtcaagtctggattgctgccattgtacaaatacgtatcaaaccaagcattccactggccaactgcgacaaacaaggcaatcgtcgcaagcacgggcgtacataatggcatgataatgcgccaaaaaatcgtaaaatcattggcgccatccatcttcgccgattcctgaagggagtacggcagcccgtccataaacgagcggacgatgataatgtgaaatgcattcaccattccagggagaacataaacccaaaatgtgttaattaagttcaattccctcatgagcatgtagccaggaatcaatcctcctgtaaaataaagcgttaacactagcgtcgtcgacacaaactttcgcccttgaaaatcggcgcggcttagtgtaaacgcaaccatggccgaagagaaaacgccaagcacggtaccaatgatcgtccgcaacacggaattgatgaaccctgtcactaaatggtcgtattggaagatcgttcggtaattctcaagcgtccattcccggggccaaatgtaaatgccgcctcggactgtgtcggttgaatcatttaaagaaatcgccagcacgtttaaaaaagggtaaagcgttgctaaaaacacgatcgttaaaaaacagtaattgatgacattaaataacccatcgcttgttaaaaagcgcatcggcttgctatgattcacttccctccccccttacatgacactttgattggcatagcgtttgaatatgccgtttgcaataaaaagtagaataatcgctacaagcgagttgaaaatgccgatcgccgtcccataagaaaaacgactaaggttaatgccataatttaacgcatacaaatcaagtacttcagaatagttaacgactgtcgggtttccaagcaaaaattgcttctcaaaaccgatggtcattaagctgccaatcgacagaatgagcacgactaaaatcgtagggcggatgcctggcaatgtaatatgccaaatttgccgccacctgctagcgccatcgacttttgccgcctcataaagctgaggatcgactccggccattgccgctaagaagatgatcgagttccagcccatttccttccacaaatcagcaagtgtgacaataatccaaaaccattcgcctttcgtcataaattggatcggcttatcagcagcccctgtcgccacgagaatttcattgacaatgcctccatcaacagaaagcatttttgtgacaatcccagcaacaacgacccacgagacaaaatggggcaaatacgaaacggtttgtacagtctttttaaacaatttggcccgcgcctcgtttaacagcacggcaaataaaattggaaatgtaaaaccgacaagcaaccctaaaatgctcatgactaatgtgttccgcaacactaagtaaaagcgttcatcttggaacaactcaatgaaatgcttgagccctacccaatcctgttcaaaaaaggccagccctgggcgataatcttgaaaggccatcgtccagccaaacaacggcaaataatggaatacaaacacccaggcgacaaacggcaatgacatcgcataaagataccgttgctgcaatacagtttgccaaaaggagcgtttttgcccaaaaggcacagcagcgactgaatgcgctttcttttttgtgagcttcatttcacccccgcctctctgtctttcatcttagctggatttcgattttggaaataccaactaaatccgactagaaatcaggtcaaaattggagggcctagcctttttttctgaatgccgacggcgacattcccgtgtattttttaaacttgcggtgaaaataatcgacattgggataccctactttttctgccgcttcgtatactttgcagccagcgcggagcagctgtttgcttttgtgaatccggactttatccaaatacgtgttaaaataatcgcctgtttcttgtttaaaccgtttgcctaaataggcgctgttgtagtttaaaacggcagatatcgtctcaagccgtaaattctcgtcatagcggctatcgatcatgtcgatcatttttttaacagcggcgtcgttgctgcgcacgtttgtattcgcagcaagctcgtcgcacaaacagagaagcacatgccgcaactgtaaaaagtcttccgcttcttggagctgtgcggtgaaacgatagcctttttgcgcccattcttttgccaacacatggctagcgattaagcgttggatgacgttcagcgccaattcacttgcttttgcttttaaagaagcctccttcatacgccgggctgcgacatccgctaaaaaatcggagactgcctgtttggccggctctttctcgccaatatggagtgccaagtagatgcgctcttcataaaacgaaagcggctttttcgctagttgctcgtcttgaagcacggtcggcagctctgaaatcacactgcctttatccgcataaaaggccagtgaaaggagctttttggcagcagtataggaagcttgaatcgcagacagcttgcggacgcacttccctaatgccccatggcgcataggcgcgagcaaatgagacgcccactgctgcaactcgcttttcgttagcccctcttgaagatggcaaatcaataagccagcgtccccgcctttggcaaaaggcacagcggtgtggggaatctgttcggctaagtgctctaatgcgtctctctccccagcgtgcaccaaaaatatttgataccgtgaagcagcaagaccgaggcgggagatatccacacttggcggcagcggctttcctgccaacaagttgagcagaaggcgttcttgctcaatccgtacactttgctggcgcaggacatgcgcttgttttctttgttccaatttgtgaaagacgatttgcaaatgctcaataagctcatcttcctctaaaggtttgagcaagtacccgtctacgccgtggccgatcgcctcttgggcgtagtgaaagtcggcatgcccactaagcaataagaaagggaccgcttcgttttcagtgcgaatttgcttcagcaaagacagcccgtccatttgtggcattcgtatatctgcgatgaccaagtcaggcttatcgtgtttgtatttttcaagggcatctttgccattgcatgctaagctagccacttcgaagccatagtgttcccagggaattagattttttaccccttcccgaatcatccactcatcatcggcaatcaacactttatacatagcttccttcctccttcggaatcaaaaagcgcaccgttgtcccctctccttggctgctgctaattaggaggccgtcggtgccgtacgtttgttttaagcgctgatggacattgcgcaaaccaatccggttttccggcttttcgagaggatcttcgatcatttcccggacttcttgctgccgttgtggtcccattccgatcccgttatcgctcacttcaatccatgtcccatcttctgcctgcttgatgcgaatgttcacataaccatctgcctctttggcttcaagcccatgggagacggcgttttcgacgagcggttggattgtgagcggaatcacagcaacgttatcgcttgtgacagcatcgtccatgtcatacgttaggcgctcgccatagcgaaacgactgtatctctaaatagctccgcaccatttccagttcctcctttaatggaatcatgctgctgccgacttctaaactttttcgcaatagctgccctaggcgtttgactgccttcgcaatgtccgtttcattgctcatatgggcgcgcatccggatcgcctccagcgtattaaacaaaaaatggggattcatttggctcgccatcattttaaatttcatttcattttgcttccgttcaagcgctgttttctgttcattggcttcgagcaactgggcaatcgattcgttcaagtcatcaatcattttgtttagctgcaaagaaatttggccgatttcatctgttccatcgagtgcaactttcgttgttaaattgccttgtgccacttctttcatcgtcgcacttaaacgcgaaagcctattcacatagccccatgaaaaccagacgatcaaaaataacgagaacacaatgccgagcccggtaacaagaatgccaaaataactaagttttttcgccgcgccaacgatatcctcggtatggatgatggagacaatccgcagttggttttggcttagctcgggaaacaaacttgtttccatcatgtgaatcggttccccatttgcttggccttcataaaatccatgctttccttctcccctgtctgtcactacgacaagctcgtctaagttttcgccaatgaatgacggttccgacgacgaaataatggaattctgttcatcgacaacgaccgtctggtgcgtttcctgttgcataatcgtttccaacaggtcaggggcaatcgtaataacgagcaatccgaatgtgccgtattcaataaaattaatccgtttcattaaacttaaatagtggccgccaccttgcgtctcatcttgcaaataaaaccattggtaaaagcctacatcctcttttgcgatggtgtaccaactagccatttgcgacccttccactggtataaacgtccagttattcaacaacgttgggttgtccacataaaggcggatcgtttcaatttctgggtggtttcctttatggtaggcaaaatcagggtaagagcggtatgcttgaaagacagaaaatgagtgttcgtagtcggtgttgaccaattcgcttaaccgttcatcaaattgcaaatgattcgcaaccataattggccctttcagtacttcattgattcgctgtttgacacgttcgacattcatgtctgcctgttcttgcgcatcctttatggcattggcttttaattcattggttaaaaacaagccaacaacggcaattggaatgaccacgctagacaggaacatcagaataagcttatcccgtattttgatttgattcagtttcgtcgaaacatattgatgaaaagcattcctcatgttgtcatctcctttaagcaaacgctttcaattgtgccctcattataacgtatgcctaaaaagccgaatccgctatgttgtcgattcttcgacaaccatcagactgatgaaaacacttgtcagacaaagatgcgagtagaccgtaggaaaatgccaacgacgatagaagcgccccgtttggctatcgttgttgttcctgcgtctacattcagtgtaggacaaaggcaaggacagcatatagagagaaaatcagtgcaaatttcatgttaaaattataggtaacaaaacaatccggttgctggaaaacctccatgccatcaagacttttccccggccctcctgtcgtttttttgcttttttccctttagccgcctcattgcgcacggcggcaatctcatgtacgataatcccgatttcgaaaacgctatcatataaatgaggtgagacgatgaagttcagcaatggctgctggatgaaccgagcaggctttgaaattcgatctccgcaagaagtgtatgacattcgcaaaacagattcagaggcaacactgtatggcccattccaaaaaatcgcccatccagggatgacgcttgacggcggcatgatgaccgtcactgtatcggcacctatgaatgatgtgattcgtgtccgtagcgtccaccacggaggcggcgttgacaaggggcccgatttccctctatatacggaaaaagcagacattaccagcaaagaagacgaacagtccttttctttccaaagcggcgaacttgttctaacggtcaacaaaaatgattggcgcttcgctttttcacgaaaaggcgacttggttactacaagcgaaaggcaatgcttaagccacattgtcgatgataacggagctccctttatgcgcgaacagctgtcactcgacgtcggtgaatacgtatacgggctcggcgagcggtttacgccatttgtaaaaaacggccaatctgttgacatttggaacgaagacggcggcactggcagcgagcaagcttacaaaaacattccgttttatgtgagcaataaaggctacggtatttttgtcaaccatccagaacgggtatcttttgaaatcgcttcagagaaagtatcaaaagcgcaatttagcgtccccggcgaacagcttgagtatttcattatttcgggtgacacccttaaagatgtgctccgcacctacacaaacctcaccggcaagccgccactgttgccaaagtggtcatttggcctgtggctaagcacgtcgtttttaacaaactatgacgaaaaaacggtccattcgtttgtcgacggcatgcaagaacgggacttgccatttgatgtcttccattttgactgcttatggatgaaagagttcgaatggtgcaactttcagtgggatgaacggacatttccagacccaaaaggcatgctttcccgtttaaaagaaaaagggctaaacatttgtgtatggatcaatccatacatcggccaaaaatcaccgctatttgccgaagccaagcagaaaggctacttgctaaagcgccctgacggcagcgtgtggcagtgggacaaatggcagcctggccttggcgtcgttgactttacaaatgaagaggcaaaaacgtggtatacagacatgctggaaacgttaattgacatgggcgttgatagctttaaaaccgattttggcgaacgaataccgacggacgtcgtttatgcaaatggagccgaccctctgaaaatgcataactattacacgcacctttataacgaaaccgtttacacattgcttgaaaagcgcctaggaaaaaacaaagcggtcctgtttgcccgctcggcaacggtgggcggccagcaatttccagtccattggggcggcgatagcttttccacatacgcttcgatggccgagacgctccgtggcggcctttcacttggactagccggctttggctattggagccacgacattggcggatttgagacaggctctacgcctgatctgtacaagcgctggacgcaatttggcttgctgtcctcccatagccgttaccatggaagcggcgattacaaagtgccatggctgtatgacgaggaagcggtagatgtcacacggtcgtttacgaaattgaaaaaccgattaatgccttatttatttgccaaagccgtcgaagcaagcaaagatggcgtgccaatgctgcggccgatgctgctcgaataccgagatgacgaaacatgccacacacttgaccgccaatacatgcttggcgaccgcctgctcgtcgcgccgatttttaatgacacaggaaacgtccgctattatgcgccagcaggcaattggaccaacctcctgacaaacgcgttcatcgccggcgggaaatggcatagcgaacaccacagttatgaaacattgccactgctcgtccgcgaaaacacgattctccctttcggcgcagaagagcaaacagcggactatgattataccgaaaatgtagcctttcatttattcgcgattagcgatgaagcaacgtgtacgatccacgatgaaaacgggacagctgccgcttctgcccgcgcctcaaaatcaggcaacacactcgctttgagcgcaaacggcgtaacaggaacatgtacttggctgctgcgcaacgtcgacaccattctctccatagacggcgggacgtggacaacacatgagcttggcgtcttaatagagggcgaagaagtaagcgtcacattgcctgattaacgtaagaacggggcagccgtcgctgccccgtttcaaactgtctattgcgtctttcactctcctgacttgtcaggttctcatcaacatttttctctgtcgtcctcatcaaccaacttcacttatccgttcactgccaccttttcccgcttctgtaaacaaccgtttgcgaaaatggaagatgagaaacatcaacgctgtcatcacgagcgcaaacgcgaagatcacgagcagtgttacttgtacggaataatgatcaagcaagcttcctgttagacgaggcaacagcgctccgcctagtccacccatcgcaattaacaagctcgttgtccggtcttcaagccctggcagcccttcattgacaacaagcaatcctaacgaaaagatgcctcccattagcaaccctgcgaaaaagatgacgataaaactgatgatgtaatggggagaaatcgcaaacagtccgagcgtcgctaactggccaaaaacagcaagcaaaaacaaggtcgcgacgtttactttgccgacaacaaagaccatgatcatccggccaatcgtcatcgccccccaaaagacggtaatgctaagggcaagcacagacggggaaaggtcagatgtcattgctaaaattgaaggcaaataattcgggaacgtcatttcgacgccaacatagcaaaagaaaaagatcgagccaaataaaaccaatggcagcgacgtttttggataacgagcctttaatggcctctcatccccatcagcaccggcaacggcttcttttgttagcagtggctcatgttcatcaaaacgaagaaacagccataaacagaagctaaccaccacagctgcgccgacgaccaaaaacaccatattccaatttccatttgcaatcaatagagcggaaaggacgggcacagccagcgcgcctaccccgaaaaacacttctgtcagcaccataatcgaagcctttttttccttcaacttgccaataattaaaccggcaagcacggtctctgtaagccctaaccctgcacctccaagggggatgatggcaagcaatacattccaaggcagcatcaagaacagcgacaattgcgaggctgcaaacaacgctaacgccaacagcaaaacgagtctgcggccaagtacctttataacaagaggcgcaaacaacacccctactaaaaatccaagaaattggttcataattagctgtccgccatcacggtaatcaagctgatacgcatccatcattggctctaggacagaaccgataataatatggccaaacccggcaagtaaatatgccaaacaagccatccatacgagttttctcatcgtttcctccgatttcgtctctcattcatacgcattttcttctagtcctcttaacaccatcgcctttaagcctcgcaaaaaatcagcgccaaaaccgtcagatacaatcactttcggcgagactggcatcgggtgatcgtgctcgtgtgcttgccaagcagctagcaattcttctttgttgcagcgatgttggtaaataatgattttgtcaggggcaagcactgcattaagcagttgcagcgtgtagcaaacgaattcagtaaaacgcctgctttcaagcggctggtaccaatcaacgtcgacaggcagaaatttaatttctcccgccatcccgtttttgcctttaaacaattttccgtctatatacatggctgaaccaggtgggcgatgttctggaaaaaagaggccaatgacagactccccttcatttggcggatattttgcacaatagccgctcaaggctgcattaatgtcattttcccaccatactggcaaagcacatcgctgttggatcgtttccgttaacctcgctccaattagtttttcatggctgctgactttcatttctccgtccacttgctggccaggaatgcccattccaatcattttaatcgccggataggccgctacatattcatcgacaaggatacaaatcgcgtccacatcaaaattggcaactacatgtgtttgttttttcaaggcatcgccgtttaagttaatcaccgacacaagtacttcttccttatgctcatgaaggattaccaacaacgccatgcaaatgtcatagttgtaatgatacgtgactggcggacggcctcccgttgaatgagctgcctttccttcgtaaatttcccctatctgtataagctcttttacaagcgaggcgattgtcacaacgcttaacccagttgcttccgccaattccggttttgtcgcacttcctgctgtccgcatggcacggcgcacattgcccaaattgatttctttgagcaactgcgtatgcgcttttcccataggcacctccatccccacctttataaactcactttataaagtcatttgacaaagtaagtatggctcagcaagcacttgctgtcaagacaaaaaaagagcataacacttggttatgctctttctttagaacatgggtagcacccttgttttacacttatgtgccacaataggtcacatagccatgttggcaacgttctggcacctcggcatatcgttcttgctcttcgctgtacgcataaggctcttttaatacagcaatcaattgtttcaccaagctgtcatcttcttcatcgactgcagccgcaagcgcttcttcgacgcggtggttacgtgggataacggcaggattgttggttcgcatcagcttcatcgcctcatccttcgtttgcgcttgcctgctttgccgctgttgccattgttcgagccactcggaaaattcagcagctccattcatcgccgttttttctggttggcctagtgttaacaaccggaatgtattggtgtaatccgcttcatgttcatgcataaggcggagcaacttctctacaaagtccttgtcaccgtcttccgcattgaataagcctagctttttgcgcatgcctgccagccaattgcttacatattgacctttaaagccttcaatcgctgattgggccatttccacccctttagtttcatcttcagcaagcaaaggcacgagtgtttcagcgaacctggccaaattccagttggcgatttgcggctggttgccgtacgcataccgcccttgcgtatcaatcgaactaaatacagtcgccgggtcgtagttatccataaaagcgcatggcccgtaatcgatcgtttccccgcttatcgtcatattgtcggtattcatgacgccgtggacaaagccaacgagctgccattgggaaatcagtttggcttggcgggaaatgacttgttccaacaaggataaataaggattctcgctttccgctagttctggatagtggcgcttaatcgcatagtcagccaatgttttcacatcgcttacttcgccacgcccagctgcatattgaaacgtgcccacacgaagatggcttttagcgacacgagtcagcacagcgccaggcagttctgtttcccgccatatttcttctcctgtagttacaacagcgagacttcttgttgtcggaatgccaagtgcgtgcatcgcttcgctaatcaaaaattcccttaacatcggtccaagcgccgcacggccgtcgccgccacgggagaaaggcgtccgccctgatccttttaactggatgtcaaagcgattgccatcaggcgtgatttgctcgccaatcagtaatgcgcggccgtcccctaacattgtaaagtggccgaattggtggccagcatacgcctgcgcgagcgcctcccctccctcagggatcacattgccagcaaggacggcgacgccttcaggctgctgcaacgcttccccattcaagccaagggcagtcgccaacggttcattaaagaggacaagctttggcgaccgcactgggtttggcttaagacgggcgaaaaacggctgtggaagacgggcgtaactgttgtcaaaattccatttcgcttgttcagtcatggtatccccttttcgtatgtgccattgattatagtcagtgtttgttgtttattttccattatacatggcatcattacacataccaatgataacggccgccttcccttttcgtcagccaacgccagcggagattgaacgtgctgcttaaaaagtagggccaatccgccaaatgccaaaatcatgctgttttaagatttccgctttcgttcgtttgcctgacgcaactgcagcgacttctgctaataggcgttcgcctgttgattcgatgctttcttttccctcaataatcgtacctgcattaaaatcgatgttttcgttcattttttcaaacatcgccgtgttggttgcaattttaatgactggggcaattggcgagcccgtgggcgtgcctcttccacttgtaaacaagacaagttgcgcgccccctgccgtcatccctgtaagctgctcaatatcgtgacctggcgtatccatccagacgaggccttttttcgttggtcgttttgcataatcaacaatttcatgcaatgttcgtgttcccgcttttgctgctgcacctaaagacttttcttctaatgtcgtcagccccccttgtttattgcctggactcgggttaccagtacgaatgtcaacacccatttgataagcgcggctttccattgcttctatcacttcataaacacgcttggcgacgtggtcattggctgccctgccggcgagtaaatgttcagcaccgattaactcagtcgtttcagccaaaatcgatgtgcctccataatcagcaatggcatcgctgacataaccgacagcggggttggccgacaatccagaacaggcatcggagccgccacattccgtgccgacaataagatcagaaaacgcaatcggtttccgttctagcatggacgcgtcttgcaccattttggtcgcaatccgcgctgcttcacaagtcgcttgcaacgtcccgccatagtcttggatcgagactagttcaacaggcttgttgctcttcttagcaatttcttcagcgacacttttgccttggtgtgtttcacacccgagccccattacaaccactccgtaaacatttgcgtttaatcccattccgacgtacgtccgaaacgtttgctcatagtcgcttcccacttgtgcacacccgtgctggtgaatgacagaaacagtgccatcgaccagtttggttacgttttgcgcagcctgggtggcacagacaatcgttggcaaaatgagcacatggttgcggatgccgacttgaccatcttgacggcgaaaacctgttaattttaaactcatacgcgttgatctccccttccccttttgccttccacattatggagatggacatgctctcctgctgcaatatcggttgaagcaacaccgatcacttctccatattttgtaatgtctgctccctttttgatcgggcaaagggcaaatttatggccaaagcctatatgattttttaaatgtagtcgctgttctccggcgagcgtgactacttgccctttttcaaaatcccgcaaggcagtggcgacattgtccttttgctgcatgacgacatgggtctttgtttcactcaaattgccttcatcctttccattcaaatgcaaaccaatgttttggtagcattccaatgtgtggtcatcacttccttgatcaacctacatacgcagccgcaaatggagcgacggccatgttttcattggcaactgctccgactcaggtctttgcgattgattgacttaagacaagacagacggcaaccacaacgacaaagccgggataaaaataatgattagcgttaagccaatcagcagcagccaaaatggtatgacctctttaatgaacgtttcaattttcacctttgtaatcgaggccgttgtgaacataatcgtgccgatcggtggtgtaattgtgccaatgctcaaacaaagaataaaaaagattccaaaatgaacagggtcaattccgtatgtctctagcatgggcataaagattggcgttaaaataatgagcatgacgtttccttcaataaacattccgacaatgagcagaaacaccaacaataacactaaaaatgcaagtggctgttcgactgaagtagtcattgcagaagcaagctgttgtgggacttgctcaagcgtcaacatccagccgaatgcggtgcctgctgcaataataatcatgacagtggcaataatttgcacggattctttcgcagcggagactaaatccttgaacgtcatttccctgtatataaacaagccaataacaagtgcatacaagactgcaacggctccagcttcagtcgggccaaacatccctaaacggatgccaccgataataagaattggcagcaaaagagcaagcaaagcgtcttttgaagcaatcgctacttgtttgaaagaagggaaagggttcttttcttgctcaaagccacgctttttagcggcaaagtggacataaacgagtaaaatcgccgccaacaaaaaacctgggataataccggcaataaataaatcaccgatagagacattgcctacatagccatataagatcaaagcaattcctggaggcaaaatcggcgtaatgagcgagcttgtcgctgttaatgctgctgaaaaaccaggcgcatacccttttttgaccatttctgggacgacaatttttgattgcattgcggcgtccgctacattcgaacccgataagccacccattagcacactaagcaacacattcactttcgccaatccgccagtcaagtgtccggttacaagtttggcaaatacaagcattcgttgtgtaattccggtatagttcatcaaaacgccagcagtgataaaaaaagacaatcccaagcaacggaaaggattcaactccgcttactacccgttgcgtcaatgtttcattcataaagcttggattggcaataaagtaaatagccacacctgcaagcatcgcgtaagctacaggaacattcaggacaattaggagcacaatcacactaacgatcaaaagaagcatcatcgctattcctctcttcctggtaaataaatgagcggtccttgcgcaaaagtacgctgactaaatgatagagcgcaaggatgccgccgacaggaagcgccatataaatgaggcgaaaaggaacgccaagcacaggtgttaccttccaatgagtatcaacggctagctttgcgccccaataaacaaaaacaacgcctgtcacagctagtaacacaaataggcgaaaacgttgcacccacatgaacgcccctttaggcagtttgcggacaaaataatcaattccaacatgttcatttcgcttcatgacagcactaatgccgacaaacgttaaccaaacaaacagcgctaaacttatttcttcgctccacgtaatcggctgggacagcacaaatcggaaaaacacattggcaccaatcaacatgacaatcaggctcaaagcaatcgcaccaatccaatcatcaacggactcaagccaattattcgctttcttcttcattcctctccctctttcggcctctgtgccattaaatcgcgcacgttttcgtaaagccctggtgaccatgatggcatcttttcgtaaaaaggagcgactttttctcggaacagagcttgatcgacgtcattgaccatcatcccttcgtcgacgaaaaattgcagcgcctcctgttccttttgtttggtaatgtcataagtatactcagccgcttcctcactcgtttcagcaaggatcttggcaaggtcatcaggcaaatcttccatcattttcgcacctgccacccacacactcattactttaatgtggcctgttcgtgttaaatgtgacgtcacctcattcgtacgagtgccctgaagcacaggtagaggattttcagcgccatcgatgaccccttgctgcaatgatgcatataaatcaccaagtggaagaggcgttggcgaagctcctaactcttggaaagcacggatatacaagttgttatttgggacacgaattttcattcctcgcaaatcatccggcgtgttgacttcttttttggtcatcaagtgccgctctccgtaaattgtcctcttccctaacagagaaagtccgagctcgttcatctcctcttcaagccctgcataccaatcggtcgtcgtcaaataaagcaagtcttcaaagctctctgctaaatatggcgcccctaaaatgccaaagtcaggtacgtaatccattaaaaaatcatacgcagtgaagacgatgacgttgttgccgcgcatcgccaactcaatcatgtcgctttcactgccaagctgagagctagggtatacgtgaagttgcaagcgaccgttgctcgcttctgctgctagctcttgccatttccttgcctgttgatcaattggttccccaggctgattcccataagcaatattaattgtatacacatcgtctaacgccgtcttcgatgccacggtcggatacccacagccaactaacagcaagcaccacattgcacatacgactgtattgaacgtcgcccccttcattggcatccatcccccttttgctgtaatcgcctttctcacgatccagtgcgaccaatagaaagcgctttcaaatatggtcctctgtatgctaccatgattaccaaacacgataaattgcgattgtgggtgtaaaagttgctttttttagtctaaaccaggaggtgctatatggggccgattcgcaaatgctttaaccaatctcacattgtgcctttccagcttgtccataacaaagccaaatcttgtgacgacgaattgccacaccatttgcatgaatggcatgaaatcattgtggtccatcaaggtacgtgcacgttttttattgatgattgtttttttgagcttgcttcaggcgatattgtgattgtccccggcaacagcattcattgttcgcttcttgacaaaggcaaaaccgtaacaacgtccgcattgtacttttgtccaagcttgcttgcatcgatgatcggctccgagtctgactcactccattctctttttacaacggctaaaacaacaaaacagtaccgctattatatggaacgagagaaacgggcgtttttagctggcctctttgacgaaatagccaaagaaacagctattgctgatttgtattcaggcgaaacagtaacgttgcttatccgctacgcaatcgtgtttgtctcgcgaaactgcggcactgcccaagaaaaactgtctccgctcgtacctgcatggataaaagagagcttagcttatattgacgcccatttgcacgaagaactcgatttaaaaatgttagccgcccatgcttgtgtccacccctcttatttcagcaaaaaattcaaagcctctattggcctgacttatatcgagtttttaaagtcaaaacgccttgttaaagcaaaagatttgctaaaaacgactgaccttagcatccaagccattgccgaagcctgcggctatcacagtatgccccatttttatcggactttccgcgctgcaactggaacaacgccagccgcataccgaaaaaacagctaggcattcacaataagagcaagagccccatcattgatagcacggataaaaagaagcaactagtctacgaaagaagtcgattattgatttctgatttttatgctaaaatagaacaatcatctttaaaagcagcagttaacaaaccaaaaaaggagcggttcccttgaaattatgcacgttggaacacaaccacttaggcgtcgaacgaaatgggcaaattgcgaatatttatgaggctttgcaagctcgccctgctgaggaagtcccagcaacaatggacgaattgatcaatcagccggaatcgctgccagctttagaagcttacatgcaaacattagaacaaacagggccttacatgcatgccattgagtcctgtacgtttggccctgccattccgaacccagagaaaatcatttgcatcggtcttaactataggcgccatgcagatgaaacaggttccccttatccagaaacgccgattctctttagcaaatttaataacacccttactggtcatggcagcaacattgtcgttcctcctgtaacgcaagcattggattacgaagtagagctcgctattgttattggcaaaacggcgaaacaagtcactgaggacgaggcgcttaattatgtgttaggctactgcacggctaacgacttgtccgcccgtgatctgcaaatgaaaacagcgcaatggcttttaggcaaaacatgcgatggattttgcccaatcggtccgtttcttgtcacaaaagaagacattgctgatccgcaaaacttagcgcttgagacaagagtcaacggcgaaatcaaacagcaatcgaatacagccgatatgatcttcacatgtgccgagattatcagttatgtttcccgccactttacgctaaagccaggggatattctccttactggcacgcctgaaggagtcattctcggcctacctgaagcagagcggcgttatttgcaacctggagacaccgtttccgttcatattgaacaattagggacattaacaaacaagctcgtgaacgctgaataagagcaaatcgttcgttattagagaaaggatgaatcgaatgaggcaaatcattgcccttggaggaggagggttctcgatggaacctgacaaccctttattagaccgctacatactgaatcaatccgccaaacctaagccaaccatatgctttattccgactgctagcggtgatgccgaacattatatcgctaaattttaccacttcttccgcaacgaacattgccagccttcggatttgtctttatttagaccgccgactcgagatttagaaagctatttgcttgaaaaagacatcatctatgtaggcggcggaaacacgaaaaatttgctcgttttatggagggaatggggcttagatgcgataatgaaaaaagcgtgggaacaaggaaccgtactagcaggcattagcgccggttcgatttgttggtttgaagaaggcgtgacagactcttacggaaaggggctcgaaccattaaccaatggacttgggcttttaacgggaagcaactgtccccattatgacggcgaaacagacagaaggccgcgctaccaacaattcgtaggggctggcaacatcaaacctggaatagccgccgatgacggagtcgcccttcattataaagaaaaagacgtgtggaaaatcgtcagctcaaggccgcaagcgaaagcctaccaagtcgattatgatggcaaacaggtgaaggaaatcgagttagagacaacatttttaggggctgattgaaaaggagcatgacttgagtagcgatgtttgcctttggcgctgctttccggcgcctttcctgtccatgcgctgctgaggccgaggcaatcggatacatgcagctgttttcaaaatcggtcaacacaaaaggagaaacacaatgaaattaaaacaacgagtccttgaaaaggatgggtgcccaattcattattgggtgactgccaaccatcgcggcccttggttgattttcatgcatggcgccggtacggaccatcgcatgtttgctgaacagcttcatgtaatcgatgaaacgtacggcctgcttttgtgggatgcacgagggcatgggctatcccggccaattgggacggattttacgatcaagctgttgatcgatgacatgttggcgattatgacgaaagaaggcattgaaaaagcgacatttatcggccaatcgatgggcggaaatgcagctcaagagttggtattccaccatccagacaaagtcgagagcttggttttgattgattgtacgtgcaatacgcaaaagatgacgttcatagagaaaggattaatcaccctcacgccgctgctcttgtcactgtatccgtggaagatgttagtcaatcaaagtgcacgcgctagctcgattaaacccgatgtgcaagcctatttacgcgagtgctttcatacggttggccgggaggatttcccgaaaatctttcaaggcatgcaagactgcttgcacgaagaagaaacataccatatccaaaaacgatttttacttgtctgtggcgtcaatgaccaaacaggcaacataaaaaaaacggcaccacgctgggcgaagcgagagccaaatggggagttctattggattgacaatgccagccattgcgcccatcaagataaccctgaagcgtttaacaaggtgtttttatcgtttcttgacaacgtttattcctcgcattccgataacggatgaatactgcacgattctcgtgttggaggttttatgaaaaacattcttcttggtttcttagcggcactaggatcggcaatcatccagaccttttttgacaacatgaacgggttttatgtactcggctccgctctcggggcattctgccttatagccgtggttaggcctctgtatctgaaagcttatagggaatgagccactgtttttagaagcagtggctcattccttattctcgtccttatcttgatccatgtacacttttctaggatagaggcttgtccgttgtacaaagatctgccaactatctattcattgtgatcttcaaccaagccaaaatcaatacgatttaagtcgcaaaaaatgaagcacgacaatagtgaaagcctttcgctagttcctgtttgtcaagatgcttgccaataaaaacaatttcactttgcctcttttcctctttcgcccacggcgctccctctgtacttgcaaataacatatgtacgccttgaaaaacaactcttttctcaagttgctttatataaaggactcctttataacgatacaacgtttcccctttaaaatggactaaataggcgaaccagttgttcactttttctaaatcaaggggatgatcttcctgaaacacaaaagaagtcacttgttcattatggtggtggtgatgcatttcggttaataaagttggatctattttcactatattttttaaatcaaaggattttttcccaacgacatctcgactatctacctgtgcaaatgttgtataaatttgcttcgcatgtgggttcatatgagtcagccgttgtcccagtttatttttttcatcgtccgtaatcaaatcaaccttatttattaaaagaacatcagcaaaagcgatttgttgcccaggctcttcttccgctaaatgttgccaaatatgtttggcgtcaaccatcgtaatcacatgatcgctttcaaatgaatgggccgtttccttatccattaaaaacgtttgaatgacgggtgcagggttagccatacccgttgtctcaatgacaatacggtcaagggattcttctcgttcattcaaatttcttaatcgattgattaaatcagcccgtacattgcaacaaatacaaccactattcacctctataatttcttccttagttggcacgaccaagtggctatcaatcgatgtatcgccaaattcattaatgatgacagccacattttgctcatctatcccttttaagaagtgattgagcaatgtggttttccctgcgcctagaaagcccgttaaaatcgttaccggaaccatttgttgttttggcaagcctctttttcctccatcgcctacatttccaactttgatcgtaacatgtgttgccgcaaacacaaatcgtataaattacgatttaaaaaaattatatgatgttcatgtaggaatgtaaatagcaaagatggtgccctccctcatacgtcgtttttcgacacaaacgaaaaacaatggtcaaatcaattagagttttctcctcttttaacagcgacttaaaacaactatgattaccctccacaaatccactttgatagaagcaaagcgagagtttcaatcaaccaacagctccgatatccccctttatggatatcgattattattcgaacgaaagaaataaaactcttgacggaatagcaaaagaagtgttagcttgtaacaaaacgtaataattacgatttatacttttaccttaaaggagaggaaagaaaaaatgaaaaaactacttattggcttatcaagtttagtggtactcagtacttatttaacagcatgtcaagggacaaaagagaaggagcaagtaaacggaatagaaaaagaagaatcagaagtacatacagatgaggatcactcccatggtgatacgaacaattttgaggctcccgaaaagataaacattgaaggggttgctgatcactaccatactggcgatgcaattgagctaactgcagaactggatgaagaaacagactatgatcattggcactggtatagccgagaaaacgcggatgaggaatgggaagtcgtttcagggcaggaaacggacacatttacaggagaagcaacaatagatggcttagaaataaaggctgtattattcgatcatgaccataagcctcacgttcaatctgcaccagtcaaagtggtgattgatgatcatcatggacatgatgaggaaagccgccaaatctatcaaggctattttgaagatagtcaagttgaagatcgcgaattgtctgattgggaaggtgattggcaatcggtttatccttaccttctatctggagatctagacgaagtgtttgaacataaagcagaagatggagataagacagcagatgagtacaagcaatattatacggtcggatatgaaacagatgttgatcgtatcatcattgaagacaatattgtcactttctttgaaaatgacaacgagtattcaggagagtacgagtcagatggttacgagattcttacctatgaagcaggcaatagaggggtacgatttatctttaaattagttgatggatcagatgaaatgcctcaatacattcagtttagtgatcacaatatctatcccgtagattcccatcatttccacttatattggggagatgaccgcgaggccctcttggacgaagttaccaattggccaacgtactacccttctgaattagacaaagatggtatcgtacgtgatatgttggcacattaaatgtcgcagaagttcatttaaaagaatatagttgaaattcgtactaatgtgaggagaatataggatgaaaagcacttggttcgctaccattttgtttagttcacttgtgtgtacgactcttataggctgtagccaaaatgaagacgaaaatactgcaagtgagaaattatcggttgtaacatcgttttatccaatgtatgaatttgctcaacaagtcgcaggggatcgtgccgacgtatcactcatggtttctgcaggagaagatgctcatcattatgaaccaagtgcccaagatgtagcggctgtgaatgaggcaaaagtatttgtctatagtagtgaagaaatggaacattgggtttcaagtctattaaacacagtcgagaacgatgatctcgtcattgctcgcacagcagatggtgtggatgtagttgatacgagtggatcaggtcatgctcatgaccacgatcaacatggagacgaggaaaagcaacaagctgctggaacgatcagcattcaaggggttgcggatcattatcatactggcaacatgattgaattaacggcggaattagatgaagaggtagactatgatcattggcactggtatacaagagaaagtgcggatgatgaatgggcaactgttccgaatcaaggaggacctgaattcaactatgaggcatcaggagaaagctttgaggtccgggcagtcctttttgatgagaaccacaatgaatacgccgagtcagacccagtagaaattgtcattgatgatcatggccaggaagacgaacatgagcacgatgaggaacatggtcaacaccatgaacatggaagtgatagcgcaattgaaatagttggattggcggatcactaccatacaggagacgtggttacactcgttgcgctgcttgaagaagacgtagactacgatcattggcactggtacacacgtatgagtgaagaggatgaatgggaagctgtatctggtcaaggaacagaccactttgagtataaaacgactggagaaagcttcgaagtacgggcagtcctttttgatgacgatcatcatacgtatgcagaatcagagccagtatcggtcattattgatgatcatgaatcacacgatccacatatttggctagaccctgtattggcacaagagcaagttaatgttatccgcgatgccctgattgaggcagatccagatggacaagcgatttatgaggaaaatgcagaagcctttaataaagagcttcaagccttacatgaggactatcaatctgctcttgaagatgcagaaagccgcgtttttgtcgtacaacaccaagcatttggataccttgcgcaacgttatcagttagagcaagtagcgattggcggtttatctacagaagtagaaccaagtccatcgcgtattgctgaaattggaaaactcgtggaagaacataatgtgcccgttatttattatcaacaaggggccaattcagccattgccgaaacagtcgctactgaaacagggacagagaccgccgttttgtatgacttagaagtactgtctgaagagctacaagcagaaaatctaggatacgtagatgccatgcgtaaaaacttggaagctttacaggtaagcatcaaataacaagataattaaacgatggcagataggaaacaacgaatagaaaggtcgtttcattatgcattatattgaagtaaagaatctcgcctttcagtatgaacatgaaccgctgttagaaaatatttcatttgaagtagatgcagaagattttgtgatgctaactggagaaaatggtgccgcaaagacaactttgttgcgcaatattttaggtttgctgaaaccatcaaaaggtagcgtccgcatttcaccaaaaaatcgttttggcgagaagctcatgatcggatatgtttcacagcaggttgcctcgtttaacgctggatttccaagtactgtgcttgaacttgtgcaatccggccgctatcaaaggggcaaatggtttaaaagattagataaagtagacaaagagcatgtgcggcgctcactagaatccgtgggaatgtgggacatgcgccataacaaaataggcgaattatctggcgggcaaaaacagcggatttcgattgcccgtgtatttgcaacagaccctgatttgtttgtcctagatgaaccgacgactggaatggatgtgaattctagagaagaattctataagttgttgaagcacaattgtcatgaacatgggaaagcgattttaatggttacccatgatcatgaagaaatccgtcattatgctgataaacatattgagctagtcaggaaggagggctctccatggagatgtttttccatggattcatgcaaagagctgtccaagcctccctgctaatctcattcattgcaccattgttaggcttgtttttaatattgcgtagacagtctctaatggcggatactttatcccatgtatccttagccggtgtagcactaggtttgctaatcggcgtcaatccaacgtggaccaatcttttagtcgttgcggcaattgccatcatgcttgaatatttacgagtggtgtatcgcacgtattcagaaatttcgattgcgattttaatgtcagtcggcatggctctagccctattcttgatggggttaaatgagggtggcgcgactttaagtatgaaccaatttttatttggctccattgtcaccattagtcagcagcaagtatggatgttgttcatcctaacgattatgattagtctcctctatttcgttttccgcaaacctatgtatattttgacattcgacgaggaaattgccttcactgcaggtttgcctatcaaaacgatgtctattttgtttaacgtgttaacaggggtaacgattgcaatcattatgccgatagtcggcgctttactcgtttcagccattatcgtcttacctgctgcaatttcaatgcggttaagcaaaagctttaatggtgttattttcattggaatcgtgattgccttaattggcatgttgagtggtttagtcgcttcgtatgaattaggtacaccaccgggagcttctatcatattaatctttatgatcctttttgctgcgactgcactagttaaacagattttgcgtcacactaaattagattaaatagaagtgatggcgcaaattttaatgaccgttttgcttcgccagggccatgttgttcgtttgggcaaacctcgatttatcgaaccacttttaaaaaacggcttaagctctagacatcagagcataagccgtttacatggtgattatttcgactgcctacttggacaaaggttcactcaacttctaatcaaaaccgttttaatcgccgtataaaattctttggccgcttccccttgttcacgtgttccagtacttgaagctttcattccgccaaatggcgcctgtaattcgacaccggcactttctgaattgacacggactaatccagcttcgatatcatcaatgaaggaaagggctgagccaatatttgctgtgtataaggaagcgcttaacccaaattcagtgtcatttgcgatatcaattgcttcttcgacactttttactttaataagagcaatcactggtccaaatatttcttcctgggcaatacgcatggcggaagtcacatcttcaaaaatcgctggttcgacatagaacccattagcgtattcattttcagttaaccgttgcccaccgaatagaagtgtagcgccttcttcttggccgatttgaatgtactctaaaacggtatttaattggctttcactggcgcacggccccatccaaatggttgaatccatcccatcgccgatcgtaatctttttcgtttccgctaaaagggcggctttcagttcttcgtaaatcccttcttgtacaatgacacgactcgttgccgtacatttttgccctgttgatttaaaggcaccgcttaaaattccttgcacagcgctttggacatctgcgtcgtctagaacaatgaccggatttttcccgcccatttccagttggtattttatgccattagcgcttgctgcttttgcgactcgtttaccggtggactccgatccagtgaacgtaatcccgtttaatttcttgctatttataagcgcttcgccaacaatggagccttttccggttataaagttcaatacccctttaggaaggcctgcaagttcaaaacacttaaccactttagcggctgtgaccgcactttcagaagctggcttaaagacaaccgtatttccataaaccaatgccggagcgattttccatatagggattgctactggaaagttccaaggggtaatgatgccaactacgcccaaaggcgtccgttttgtaaacattagcgcctctttatcggaagctggaatcacttccccctcttttctcatcccttctgctgcataataccgtaagatcgctatcccacgttgcgtttcaccaattgcttcgggcaacgtttttcccatttcctttgttaacgtttcggcaatgtcatcaacgtttttttctaactcatttgcgacactagctaatagttggccccgttgatatgccccggttttacgccagccgattttcgcttcagtcgccgattgaatcgcctcatcgacttcttcagttgtcgaagactggagttggccgatcgtttcagttttgttcgctggattcacactatccattacttgtccgctcgtactgtctttccattcaccgttgatgtaattttgaaatacttctactgtttgtgtaaatttcgccacttatacgcacccctatctgattttatttaacttactagaattccaatcaatcagtcttctttccatttacgattgatgttatcgacgattctttctacttctgaccttgtattggcgttaattaaatgaaaaggtttcttatgatagacacgttcaccgttaaaccatctataggaaaccgcctctttaatcgttgaaaagaatgagttgtttatatcatatagttgcatggcttcggctattaggttttggtaacgattcactgcttcgaaatgttgctgttccatcgctttctttagcttgacggagatttctgggaatacgacagctgtactattaatacttccgttggtgccgatcatcataccaggtaataaatgatcatcaaaacctgttaaaattacaaattcggtgtttttaggtctaacgttttcaattaattttctgtatctgcctatgtcactaaccgtttcttttattccttttaaattgtcatgtctttctagtaactcaggaataatgtttactgggatctcttgtgatgaaagcatcggcacattatagagataggcatctattttaatcgattgaataatttcgctgaaataatcgatcagttgtgcttcacttaatggccaataaaagggattaacaattaaaactgcatccgctcctgctttttcagcttttatcgctaaatctaccgcctcttcaacaacattgcttccaacattcaccatacacttaacccgcttattgatataggggatgacgtgatcgatataatcgctcttttgttggtgcgtcatagaagtgaactcaccgctgctccctaataagagaagtccatctacctctttttcaatcagaatatcgattagtcggaaattcgtttctttatctactgagccatcttcatcaaaaaacgtaacaagtggaggaatgatgccttgcaacaacttaatcacctcagacttctttatttttgaaaggaaccgacataattctttaatgtgccgatgggtgtagagctaatgtcaatcacatcgcctaccgctaatgtgaaatcgttatcgggaacaatacacgtgcccgtcaataagaccgttccaggtacgatgtcattgtcgcgtattagaaactctactaattcctctagttttctttttaattgactcacactagctgacccctggaaaacaacctcgtgctccctgctaatcgtacacataatcgaaagctcatatggattttcgatgccagttggcataaggatggctgggccaatggaacaagattttttccacactttcgcctgtggcaaatataaaggattttcgccctcaatatctctgcaactcatatcatttcctaatgtataaccaatgatctcttccccttcgccaataactaagcctagttcaggttcaggaatttgccagtttgaatcacttcggatcaataactctttatttggaccttgggtgcgccgtgcagtcgattttaaaaagatctcagggcgctcagcgtcatatactttatcgtaaaacgttaatacatcgagctttccattcgttgcttcgtaatttcgggcctctctgcttttcatgtatgttactcccgaagcccatacctcatctgcctctatggggatctccaaggccgtttcttcaattgatactggagctaggctgttctctttaatatacatttctgctgttttcgcattttctttaagataataataaaaattcacatagttatcgaaagggacgacatacatttcagaaaatgtctgtccaatcgcagaatggacaatatgctcttgatctttaaatcgaatgaatttcatatagagttagtctcctttttggatagattgtttagccgggtttcaaatcgaacctgcccacagcatgataacgcattcatttttttagtcactaaccggaatgcatatgaaagctgccttttttcaatccaagaaaatggtcttgaaccaaaaccattattcttggattctcacaaattcgttctattgaggctcgacaggttttaaaaatcctgcatgaagagaaattctcttggccaagtctacaatctcccgctctgcttcttcttgtttcttttcccaacttgttgttagcatcgttacactaacggcagcaatgacttcatcctcttgattctttactggggcagcaatacagaagaaattttctacggcttcttgatattccttaatgtagccctgttcagctaatagggcaatttgtgcccatagctcctctaatgttttgatggtgtatggcgttttagcctcaaggcttcttccctcatacaagtccttcatttcgttaaacgtatatttggaaaggagaacttttcccatcgcagttgcatgagcaggaaatttcattcctggatcagtggcaacccttactggggaactcccctctttctttgccaaatataaaatatcgacaccatctaaaatcgaaagctgaatcgtttcatctaaattgttgacagtgcttactgcctcctccaaaaacgtgccaattaaatcaaattgactcgagtacaaagcactaaatacaccaaatctcattccaagggaatacgtatcatccttccctttcttcacccaaccgagcgtttcaagtgtgttcagcaatgaataaagtgagcttttattaatatttaattcattggagagatcaattagccgatattgattgggccgataggcaataagatttaaaatgttatctgccttcccaatcgcgggaacccaatattttttctccatagcgccaaacccttctattttgtttaatataataaacttggttttcttattaaaacctaacatgatcaattcatgtagtcaatatcgtatttttatttaaggcaattgtccattcaagttgatttcatgagataggacacaccgtttagacagccatttatcttagcgttcacggtttttctaattgaaaaaaatctattttcaactcataaattgtatgctatcatcaaaatagtttaatacaacaaactaggtttcttatataaaaccaaattaacgacgtttttagctgtatgaagatgaatggagccattaacgaaagatgaatgagcaaaaaacacctagttgagcaaaactttaagggggtgaatttccaatgaagttgaaagcgctttattgaaattcagctttatcggtgattcttgaagcaatgataagacaataaaaaggattgctttcatttcgttgaaaggaataatctcaatcatggaggaaaacatatgtccttgcatttaatatttggcgatgaggatgtctctctttacaacattcagactcatgcaaaaggagcggatggctcactcccccttacatccgagatgttgttagattcaccaagtggcgacctttttggactatctcaaaacgttggtatgggatgggcgccttcccgtctccttggaaaacaaattttaatcctaggcactcaaggtggaatccggcatgaaaatggcgctccgattgccttaggctatcatactggccactgggaaataggcctgctcatgaaggaagcagcggaagaaatccacagacaaggaggcgtcccttttgccggattcgttagtgacccatgtgatggccgttcccaaggaacaactggtatgtttgattccctgccgtttcgaaacgacgcagcgattgtttatcgaaggctaattcgctcgttgccaacgcgccgtgccgttattggcgtagcgacatgcgataaaggccttccggcaatgatggttgctttagcgtccatgcatgacttgccaactattattgttccaggaggtgtcacgcttccgcctacaaacggtgaagacgcaggcaaaattcaaacgattggagcacgatacgccaataacgaaatcaccttacaagaagctgccgatcttgggtgccgtgcttgtgcgacaccgggaggaggatgccaattccttggaacagctggcacctctcaagtcgttgccgaagcgatgggtatcgcgttgcctcactcggcactggcgccatctggccagccgatctggatggagatggctcgacaatcagcccgtgcagcattagagatggagaaaaaaggactatcaactaaagacattatgacggataaagcaatcgaaaatgcgatggtggttcacgcggcttttggcggttcaaccaatttactccttcatatcccagccattgcccacgccgctaattgcaagatacctactgtcgaggactggacaagaatcaataagaaaatccctcgcctcgttgatgtcctgccaaatgggcctgttggccacacgactgttaaggtatttctcgcaggtggtgttcctgaggttatgctgcatttaagaaaattaggcgtactgcatgaagatgtacaaactgtgactggagaaacgcttggtgcaaaccttgattggtgggaaaaatccgaaagacgcgctctaatgaaaaaacagttgctcgaaacagacggaattgatccagacgatattatcatggacccaatcaaagcaaaagaaaaaggcctaacttctacggttacattcccgaaaggaaatattgcgcctgaaggatctgtcattaaatcgacttctattgacccttcagtagtaggagaagacggaatttatagacataccgggaaagcgaaagtctttacttcagaaaagtctgctataaaggcgattaaacatggaagcattgaagcaggggacatcatggttgtgatgggtggcggcccttccggaacggggatggaagaaacctaccaactaacatcggcattaaaacatttgtcttatggaaaacatgtttccttgattacagatgcccgtttttcaggtgtttctacgggtgcatgcattggacatatcggacctgaggcattggcaggcggaccaattggaaaattacgcgatggagatgtgattgaaatcatcgttgaccgcaatgagttagtaggttctgtcaatttcattggaacggaaaatgagcggctttctttggccgatgcaagtcaagtactgaaagaacgctccctccatccagaccttcaaccgaatccagatctgccagacgacactcgtttatgggctgcgctccaatccgtaagtggaggaacttggcgaggaaatatttacgatacagatcgaatcattgaagttctaaaagctggagtaaaagcgttagaggaagaacaattaaacgtctaaatggcacacaggttaaaacgtgcgtaaaaattcccccattgtgcttcataaatgggggatttattgaaagcgttttccgtatatggcgtttttcaatgaacggcgctttcggatagtagacaatccaagtatgttgaaagcacacgaatacttattcatttttggaggtttaggatgccattatttatcgtagcagctggaattgtcttgttactcattttgattactggattcaagttaaatacatttgtttcattaattattgtcgcttttatcgtagcgttggcactaggcatgcctttagaaaatgtagtgtcctccattgaagggggattaggaggtacacttggccatatcgcgttaatatttgggctcggtgctatgcttggcaggttaattgcggacgcagggggtgcccagcgtatcgccatgacgttaattaacaaatttggagaaaagagaattcagtgggctgttgttgttgcttcgttcattgtcggcattgccctattttttgaggtcggcttagtattattaatcccgattgtattttcgattgcaaaagaactaagaatttctattttatacttaggcattcctatggcggccgctttattagcaactcatagtttcttaccgccgcatccaggaccaaccgtaatagctggcgaatatggggcagatcttggggtcgttttactctacgggattatgattgccataccaactgtcattatcgctggccctctctttactaaggttgctaaaaaaattgcaccggatgcattcaacaaaacaggcaatatagactcgttaggagaacaaaaaacattcaaactcgaacaaacgcctggatttggtattagtgtcttaactgcgatgttccctgttttattaatggctatttctacaatcgtcgatctcgtccagaactcagtagggtttgaggataatacgatcatagaaatcattcgccttgttggaaacccttcgtctgccatgttactatctttattgcttgcattttatacaatggggatagcaagaaagatcccaatcaaacaagtgatggattcatgtgcatcatcaattgcagcgattggaatgatgcttttaattattggaggtggaggcgcctttaagcaagtgctcattgatggcggtgtcggagattatgtagccgaactatttaaagaaacgtccatgtcccctcttttatttgcttggctcgttgcggcaatcttgcgtatatctttaggttcagccaccgttgccgctatatctacagcgggattggttgtgccaatgctagcccaatacgatgtcaatttagccttggtcactcttgcaactggagcaggcagctcgatttgctcccatgtgaatgatgctggattttggatgatcaaagaatactttgggttaagcataaaagaaacattttcaacatggacgatcctatcgacaattacttctgtcgttggattagggtttattttattattcgatgcatccttcatcatcgcaggaatagccatcgttcttattagtgtggtagccatatacttcagcaccattaccccaataaaagataaaagaaaagcgttaggggcatagagtcgtagactcgtgctccctcttttcttttgatgaagcttgccttctacttctgttttcgacgcctcatcctgctaccgcctgccggttcacagtccagtaaacgattacgagagaagcatgtacaccttcctatcaaggacatagtgtggctcattcttgtttttcgagcaagccgtactttttttcggcctcctctggattttcgtaaacggcgattttcgaatcaataagcgccagatttttcttcagtgcttccatctgctttacgacttgttgacgatggtcggcgagcattgtttttcgttcttcgatcgtctgcaagccctccgtgcaccaatccgcgtactgcttgatgtctttgatcttcattcccgtatcctttaagcagcataccatagcgacccaattgagatccgtgtcggtgaatacccggttgcctgatttatcccttccgataaaaggcattaaaccttctttatcatagaagcgcagggtgtgagcggacaggccaaacttgctcgcgacctcgttaatggagtaattcaatttttttatttcacctcttgacttagagttaactcgaagtactacactcactatagaccactgctaacgacagatcaagtggtctcataacaatcagaaggagaatgagactatgatttcaacgcaaaagattgcactcgtaacgggaggcagccgagggcttggccgaaatgccgctatcgccctttcccataaagggattgacgtgattatcacgtatcatactcgcaaggacgaggcggacaaagttgttcaagaaatagaaaacagtggtcgaaaagcggcagcgatccagttagatactggcaacgtatcctcattggacgcgtttgtttcccggatgtctgcagttctgcacgaaagatggaatcgggatcagatcgatattttggtcaacaatgcgggctatggcattcacgcttccgttgcggaaacgacggaagcacaattcgacaacatcatgaacgtgcagttcaagggcgtttttttcctgtcacaaaaactgttcccttacatcgtagacaatgggagagttgtcaatatttcaacggggctgacccgttttgtcattgaagggtttggcgcttatgcagcaatgaaaggcgcgatcgaggtcttaaccaagtatatggctaaagaatggggaaagcgaggcattcgcgtcaacgtggttgcccctggagcgatcgcgaccgattttggcggaggagcggtaagggacaatccgcagatgaatgaacatgttgcctctaatacagcgctaggtagggttggagaagccgatgatatcggtggggttatcgcttccttgtgcacagaggagttcggctgggtgaatgggactcgcctcgaagtatctggcgggcagatgctttaattgaacaaggcccaagagctgcgaaagcgctccgtaacacctatttcaacgatgctcgttcgattgcctttttgcataggttccacatacttgctttagaatcaaaaggatggtctgtaatgatgatagactgtcaacacaaatttctcgcttctctcaaaaagaaaaaggtaaccgcgttatcgaggttacctttttcttacttatgaatcaaatcggaatcatcgaacgtttgctagtagctgtttaaagttgtcaactacattttcgacggtaaagccaaattttgcaattacttcctcaccagggccggattcgccaaaggaatcaatgctcataacggcaccattggtacttgcatattctctccatcctagtttcgaacccatttcaattgttaggcgggtttgaagattgcttggcaatacgccttctttatacttttgcgattgtttttcaaataaatcccaggatggcatgctgactacatttacataaatgccttctttggccaattccttttgggcattgatcgccaaggacacttcagaaccagcagcaaccaaaatccctacaggtgccccttctgctttggaaatcacataagcaccgcgtcttacaccttcttccgccaaggtatcggaatcctttaatgtagggacattttgtcttcctaacacaagcattgttggacggtctgtttgctcaacagctactttccatgcagcttttgtttcattcgcatccgcaggacgaattactgttaaaccaggcattgctcgaaaagaagctaactgttcaaccggttcatgggtaggtccgtcttgtccaacggcaacggaatcatgtgtaaacacataagttaccgggagtcccattaaagcagccaatcgaatagcagggcgcaaataatcggagaatacgaagaaggtacttacaaagggacgaagggaatgcagtgccaaaccgtttgcaatggcgcccatcgcaaattctctaacaccaaaacggatatttcgtcccccatagcgatcattaccgaaatcgatctcctctttcaatcttgtttttgtagatgaatctaagtcggcagagccaccaacaaattcaggtatacgtttgacaaacgcgttcaagacttcacttcctgctacacgagtagccaatgaacttccttcttcataagaggagagatgttcatcccagttttcaggaagttggccttccatgattcgctttaattcctgcgcaagttccggatagtgcgcttcatattgactgaacaattgattccattcttgttctttttgttttccgcgttcgcgaatcgttgcgtaatcagcataaacttcttcgggaacataaaacgcttcttcataattccaattgtaaaacttcttcgttttagcaacttcctctttccccattgggtcactgtgggcattattggttccttgcaaggaagacccataaccgatcaccgttttaatttcaataattgttggacgggtttcatcggcttttgcttcttcaatagcctttgcaatcgcatctacatcatttccatcttccaccttcatgtattgccaattcatagattcaaaacgttgttgaatattttcagagaaagccagttcaagtccgccatcaaggcaaatatcattggaatcatataaaacgattaaacgtccaagttttaagtgtccggcgagagatgctgcttcataggatacaccttccattaaatctccatcaccgcaaatggtatacgtatagtgatccacaacgggaaatccttcccgattataggaggctgccaaatgtctctcagccattgctaagccaacactggcgggaattccttggccgagggggcccgtggttgcttcaacccctggagtgaccccatattccgggtggcctggagttttgctcccaagacgtcggaagtttttcaaatcttctatcgtaacgtcaaatcctgtcaaatgcagcaaagaatatattaaagtagaaccatgccctgctgaaaggacaaaacggtcacgattaaaccagtttggattttcagggttcacgtttaaaaaatgtttccataagctataagccattggggctgcccccatcggcatacccggatgtccatgctgtgctttttcaacggcatcgagagttaaggtccgaattgtattaattgagagttgagatacattaattgttttagtcattgttttacctccatgtttttcttttcgaaaatctgatagggataacttggtttttaataatagaaaggcctctgccgccgttgcatttgctttatctcctcctacccatttttggtccaaaatttaggttttattttgcttcattttctgttgaagaagcttttttaccaaatggaaccagcattagagcaacaattatgactaggccgatcacgattgcaatggagccaaagtagttagccaacgttccgaagaagataccagatacgccaaagtctgtgtcagagaaggttgtgcttgcaaagccaagatctcctagtaccggcattaagaatacaggcaagaatgaaataatgacgccatttacaaaggaaccaacaaccgcccctttaacaccaccggttgcattccctaataccccagctgccgcaccagtgaaaaagtgtggaacaacaccaggcaagataatgattccacctgtaaaggtcataacaaccatacttacaatcccgccgacaaagcttgagaagaaaccaattaatacagcatttggcgcataggtataaatgattggcacatccaacgccggttttgcatttggtacaagctttgtggaaatacctttaaaagcaggaacaatttctgcaagaattagacggacaccagccaagatgacaaagacgcctgccgcaaagttaccggcttgagtaagagcatagacaatgaagtttgttccgtcacttaattctgtttcgataaagggttgtccagcgaacaaagccacaatgacatacataacagccattgttaacgcgatacttacagtactgtcccgcaagaaccctaaacctttcggaaaatggattttttccgttgaagtaggatttttgcctccgacagcttttccaactaaaccactaactgcgtagcctaccgcactaaaatggccaagagcaacctgatcgtttccggttaatttccggacaaatggttgcacaattgccggggacaatgtcatgataatccctaatgctacagaaccagcagcaattaatccaactgagtcaacccctgcaaccgccatgataattgcaagcatacaggccatgtataacgtgtggtggccagttaaaaaaatatatttatatttcgtaaaccttgctagaatgatattgacaatcataccaaagaacatgataagcgctgttgttgtaccgtattctgaaagcgcgaggcctacaatggcttcattgtttggcacaacacctgatacgttaaacgctttttcaaacaatgttccaaagggaatcaatgctgtttgtaaaacacctgctcctgcagaaagaacgaggaaaccgataaaggtttttgttgtccctttcacaacatctgccgttcctttcttttgcagcaacaatccaacgagtgagattaaagcaaccacgatggcaggcacactaagaatgtctattaatgtttgcataggataaacctcccaatcagctcatatgaaatttttagagcaatccattttcttgtaatacttgtttcactttgtccctcaattcttccatgtcaatgatgctttccaaaacaacgacattccctaaatgggaaccaccttctgcaatatcctttgcaaggaagaacacatccgcatcgccaggagttgctgaacttaggtcagaatggtttacttccacttccgttacgcctaactcttctaaaatttgtttaatattcatttcaaccataaagcttgtacctaaacccgacccacaaactgttaaaattttcatcatttactctctccttcattgttaatatttactatttcttcaaccgtttttgcttgtttcaattctttgagcttatcattgtcagccagtatttttgttagttgtgacaatgcttttaaatgggtttcattgtcaactgcggctatacagataaaaatatcaattttatgttgttcttgatctaaaaggagcaccggcgttttggttcttaagaacgacattccgacttggttgaccccggcttgtggtcttgcatggggaatggcaatcccttttccgatatggatataggcccctaattcttcaacattgttaatcatggcatccacataactgtcttcaattttaccagtgtctgacaatggcttcgcggctaagcggatagcttctttccagtccaacctttcatctgtgaagctaatcatatcctttgtcaataattctgaaagcattggcgaatatctccctttcttaaaaccctcaaaataaagtacatgaacaagttctgaaaataatctttcttcatctcgaatatctgcatatttcctgatgacttcaataatttgatcgacagagatattccggtaattcaaacttgggaattctttcgcaatttcttgaatcaaataatttttttcgacctgtgagagcaacggttttactaaataaaccggtttcgtagatggaaccctcactgttgaaaagataagatcataactggacttaggaatatctgtcatctgatcaatactatgaacatttaggaaatgaatattaggaaacatttcctttaactgcgcttttagcatcaatgaagaactaacgccattggaacaaacgattaacccattgacagtggaatggtttcttttatctttttcaagataaccgccaaagtgcaatgtgaaatagccaatctcctcttcgctgatcacttgcccagtccacatcgatagcggtgcaagagcgattttcacaaactcaaaaagttccggatactcttcctttatcctgtttattaatggattgactaaaggaattttaaaggaaattctaaagaatgcaggaacgagatgatcataaagactttttttcaacgtttctctattctctagcggaagcaatgtcacccgttcaaattcttcgataattcgttctgccaactgttccaataaagcgttttcatattttgattcttgcattgatattaacagcataaggctgacaaaatactgctcgctaacagcttctttaccaaagaaagtttcggccatttcctttcccgctagaaaggcattttgcctttcgataatatgctcttgatattccggaaaatttaagttcgcgtatttttttcttgctcgcaggtaagtcagaaatggaagaatctcatttttcctgcttttgactaacatgatggaatgttttttgacgacctcggcaaaaacgctctccgtttcttcaataaaatcgtcatagccccaatcattaagcggcaaatggattagttcatttccaaaaggtgaatctaacaatatattcaccgcgtataaggccaagcgtcttttatcaaattcatcaccgattaaataatatccatcttttctggaatagatcatgctcaaattccattcttcacaaatctctctcgttctttttacatcttcaagcgccgtgttcttgcttacccctaaaaatgtctgatagtgaaaattagaaataggctccttgcgaatgaacgtataaaggtaaagtagataaacccgatcttccttggaaatggtgactaaggctggattaatttcatataattccccagattcaaccgcttggattaagttttcctccaaaataaacgtattgtttttcaattgaattggaggcagatgcaagttttttaacgcataattcagtttgtcaaaatcataaccaaattgtcgttccgatacttgcatcattcttaaaacttctggtttggttacttgtctgtgctgggtaattgtttttagcaatgtgtaggatctttcatctagcactttacgtcccccatttcttgttttcattatagaccgcctttgaaagcgatacaatttgattcaaacccaatctttgttgcccatttttaaaaacgttgtactcaattgcgctggatacgagtcctttctttattgtaagcctctatcaaacaccgcttatcatgccgaagcaccccctagtatgatcaatgtatcaaccaaaagaggtgctttctttcgtagggcctcccatccaatcaagcccaaatttgtatgtaaacgcaacctcgaggctccaagtagtcgaatgctttcaatgctttttcttcaaaggcactctgttagtaacgaacgaaaaggtctatagagaatcggccattgcgtatccgtacacgtaaagtgagcgtgctacctgggatgtcagttggcggggctaggagccttggcgatactcttcgcgcctgtcccctcccgtgaatttcctaaaaacaattgctgcaaaagttctccttgtatttttaggaaacgaatttcacataagtatacgagcctaactatcgatcacctaccgactaacaaaaccctacctatattcaatgattgtctagttgtattgatattatgcatattcctttcccttacactgtacctgttttactgtacaaaaaagcccgtcgaccatctcggcaaaaaccgagtcattgtcgccaggctgaagcggtcccccttaagataaaggggcgctttttgaatattatacggttccatagattatcgtttttatttcttattcttctcgtccaaaagcgtttgtatgaatgtttttctcatcaaggaattcttctatttttttctgttcttttccattcactacatcactttgatcgattaatgattcaaaatcgatttccgaaaaatttccttcactaatgtcgtcaattagattattgagcgcatcatttaattcataaaggtattgattggacgctgtcatgtactgactaattctttcagcctcttcttgatacccttcaggcaacgtattatttaaagaaattctcatcgttttcttttatgagctcattgatttcgttaaatgcagccaaatcatgtttagttaattgttcacctgcatcgattatctcctcgaatggaccgcttgcatgatataaatcttcgctgctgtctaaatacatttttatgctttgtttgatttcttcttcgtcaatcaactcattgtttttttcagaagtgaaaatcgtactcggtatttctacgtcgcttgtgctaggtgtgtcatcctctgtagcatcgatagtttcttcttgcgaacatgcagccaacacaaaaatgatgaagaagctaataacgattcttttcatttatttctccctccactttttctcctcatccttaatttcttgttacgaatttataaccaatctcgctacagcttctacgtgtgtcgtctgcggaaacatatcaacaggcgtcacttcttccgtcttgtagccgccatcttcgagaatgcgcaaatcacgggccaatgtccctgggttgcaggatacatacacaatgcgttttggcttcatttccatcattgtccgcagcaatgcttcgtcgcagccttttcgcggtgggtcgacgacaatgacgtcggcgtcgatgccttggtcatgccagcgaggaatgacttcttccgcttcgccgacggcaaatgtggcattggtgatctggttgagtttggcgttgcgcttggcatctttaattgcttcggggacaatttcgactccgtaaacatggcgcgcttttttggctaaaaacagcgaaatcgtgccaatgccgcagtacgcatcaataacgatttcgtttcctgttaagtcagcgtattcaagcgctttgctgtagaggcggttcgtctgttcaggggtgacttggtaaaaagaccgggctgaaatcgcaaagcgaatactgtttatttcatcatacaaatagtgctcgccccagagcacgtctgtttgctggccgaaaatgacatttgtccgtttgttgttaatgttttggacgatggagacgacgcctggcacatgctttcgaatgccggaaatgaacgcttctttgtgaggcagcttcttctcttttgtgacgagtactaccatgacttgcccagtcgtttttccgtaacgggcaacaatatggcgcaacacgccttgatggctttgttcctggtaggcaggaatgcgcagctctttggcaagctgtttgactgtctgcacgacaatgtcgttttctttatgttggatgatgcattgatccatatcaacgatggagtggctccgtttcgcataaaaaccggcaacgagatcgcctttttggaaagcgactggcacttgcgatttgttgcggtagcgccatggatcgtccatgccgatgacagggcggacaggtacgtcggggagcttggcgactcggcccataacatcttttacttgtttttgcttataagccagttgggcgctgtaatccatatgctggatttggcagccgccacatttatagaagatcgggcacggcggctcaacgcgatgctcgctttttgtttggacttggagcaagcgtccatagccatagcccgcttttgttttcaccactttaatgtcgactgtttcgccagggagtgcttgagggataaagagggcgtagccgtttactttcgctacgcctgctccttcatgggtcaaatcttctattgtaacggtgagcgtttcgtttttttgtacagggggtgcttgttttttcatcattaaaatacgtcctttgcaaacattccttttcctcgccccattgtaccatgaagtttgctagggacaaagcgctaaaccatttggcgttgcttgagtgcggtgagaaatgtgtttgcaaatgaacgacatgctgctcgttcttcatctgtattcggatcaaattccatttcaagccctttggcggtgacagtggcgccaccatttcgcaaaatcgattcaaatgtatgaacggcttcacaaaaagcagggtaaacgcggtcccctgaaccgaaaacagcggcaatgacgcctgttaaatctagttcagctaactcttcggcaaaatcttcggcttcataaggcaagtcgccgtctccccatgtataactaccgatcaaagctccgtcgtaattcaatagttccgaagcgttataaccgtccatttcctccatgtcgacttcaacgccgtctgttgctagttctgatttgatcagctcagccatatcttcggtattcccagacatgctggcaaatacaatcaacacgcgcatggaatctctctcctttcccgttccttacatttataataaatgatattgataatcattttcaatgaaaaaacagggaacattctcgaaaaaacaagttaatttgtttttccgcgagggagcctccttaaaaaaaggatacaaaaacgcagcttctaaaagaaagaagctgcgttttcactagtttcgtttgcggtctttcggcataagcatctggaaatggtggtacaaattttcaaattcggccggcaagacgccgcctcgttcgccgtcgaggttcagcttcatttcatcgtctctcatgaccgatactttaatgcgcttcgcttttacgtacattaatttggggtggttaatatgctcgccccggagtgcaagcgatgccaaatggacaaactcaggaaacgatgtctttttgacaatgataaaatcaaacaacccatcttgaatggaagcggctgggcataatttttcaaaaccgccgacggagtttgtattggcgatcaaaaacatcatgatttcgtcttcaaactgtttgccatcatattcgacatggacaaaagtcggcttgacttgtggcaatttttccagccctttaatgtaataagcgagctggccaacgattgtctttagctttgccggaacttcatatgtcaactcggttaacgtgcctgcggcagcgatattggtaaaatacttctggttcatgcggccaatgtcaatcggctcaaagtggccttcacacaaaacgtcgcatgctttttcaatatctcgggaaatgccgagcgcccgggcgaaatcattggtcgtccctgctgggataatgccgagcattgggcgtttctccagccccgctagtccgttaacgacttcaaaaatcgtcccatctccacctgcagcaatgacgagatcaaagccccgttctcctgcttggcgggcagcccgtatcgcacatccttcctctggagtcgtcgcgtgtgctgacgtttcgtaacctgccttttctagacgttctaatatgtaagctaaattctttcttagttgctcacggccggaacttggattataaatcaatcgtgcccgtttcataacaatccctactttacttttttgcaatcatgtcattcttctattgtactaaaaacaatagcgagaatgggcgtaagatctactcaattttgtgaaaaataacggcaagcaacactttttatcttttcccgtttcttgcgctagtaaacgctgagtccataaaaaagcaagagaacggcttttgttcagctgttctcttgcatgttccttagcgcttgtccatttcttcaagcaagagtttgttaaccaattgcggattggcttttccttttgtcgctttcatcatttggccgacaaggaagccaagagcgcgatcttttccatttttgtagtcttcaatcgattgtgcattggcatcaagcacttcggcaacgattttgcgtaattcgccttcatcggaaatttgcacgagccctttgtcttttacaatttgttcagggtcgccgccattttcgatcaactctttaaacacttttttagcgatttttgaagaaatggttcccgatgtaatcagcttaatcatgccggcaagacctgctggcgtaagggctgattcttgcagctctttttgctcagcattcaagtaggcaagcacttcacccatcagccagttggaagcaagtttggcgtcagcgccttcgcgaatcgtttcctcaaagaaatcggacatttcttttgtgagcgtaagcacatgagcatcataagcaggcaagccgagttcgcttacatagcggtctttgcgggcatctggaagttcaggaatttccgaccggacgcgctctttccaattgtcatctatgtagagattcacaagatccggttcagggaaatagcgatagtcgtccgagccttctttgacacgcattaaaatcgttttattgccagcttcatcataacggcgcgtttcttgttcgatcacaccgcctgaaagaagcacttgttcttggcgtttttcttcgtactctagccctttgcggacaaagttaaacgagttcaagtttttcagctctgtttttgtgccgaatgcttcttgaccgattgggcgcaatgaaatattggcatcgcaccgtaaagagccttcttccattttacagtcggatacgcctgtatattgaataatcgcttttagtttttctaaatacgcataggcctcttcaggcgtacggatatccggctcagagacaatttccactagcggcgtgccttggcggttataatcgactagcgaatgcccgtctgtgccatgtgtcagcttaccggcatcttcttctaaatgaaggcgcgtaatgccaatgcgcttcttcttgccgccgacttcaatttcaatccagccatgttcgccaattggcttgtcaaattgcgaaatttgatacgcctttggattatctggataaaagtaatttttgcggtcaaatttcgtgtcagtcgcaatttggcaattgagggccatcgctgctttcatcgcaaaatcaaccgcacgcttgtttaataccggcaatacgccaggatagccaagatcaatgacactcgtgtttgtattcggttcagcaccaaaatggttggggctagacgaaaagatttttgagtctgtcttcagttccacgtgcacttcaagtccaataatcgtttcaaaattcatttccaagtcccccctttacaatgaaggtttctctttagagaagtttgttgctttttcatagacatcggcaacacggtaaatcgttgcttcgtcaaagtgcttgccaatgatttgcaagccgagcggcaagccgtctttgaaaccgcacggaagcgaaagcgctggcacaccagcaaggttgactggtatcgttaaaatatcattggcgtacatcgttaatgggtcatcggttttggcgccaattttaaacgctggtgtcggcgttgttgggccaataattacgtcataattagtaaagacatcatcaaagtcttttttaatcaatgtgcggacttgctgggcttttttatagtaggcgtcataataacctgagctaagggcaaacgtcccgagcatgatccgccgtttcacttcatcaccgaaaccttccgcccgtgtattcttgtacatatcaagcaagttgtcggcattgtcagtgcggtagccataacgaacgccatcaaagcgggctaagttggcagacgcttcggaagacgcaatgacataataagctgctagcgcgtatttcgagtatggcagggaaacttcttcccaaacggcgccttctttttccaacacgttcagcgcatcgaacacggctttgcgcatttcttctgatacgccatcgccaatatactcagacggcacgccaatgcgaagcccttttatttcgcctgtaagtgactctctgtatggcggaaccggcaagtcagcagatgtcgaatcagctgggcagtggccagcaatcgcctcaagcaaataggcattatcctcgaccgtacgcgtaatcggcccaatttgatcaagggaagaggcaaaagcaacaaggccataacgggacacacgtccatatgtaggttttaagccgacaacgccgcaataagcagccggttggcgaatcgagccgcctgtatcagatcctaacgcaaacgggacttcccctgctgctactgctgcagcagaaccaccacttgaaccgcctggcacatagtcggtgttccacgggtttgtcgttacttgaaatgccgagttttcattcgaagagcccattgcaaactcgtccatgttgatttttcctattgtgaccgtttctgctccacgaagcttcgtcacaaccgttgcgtcataaatgggatcgaagttttctaaaattttgcttgagcacgttgtccgcaagcctttcgtgacaatattgtctttaatgccaatcggcatgccaaacaacacgcctttttcactcgcgtctacttcgtcaagcttcttggcgaggtcacgcgcccgttcttcgtcaagcgttaaaaacgcctttacttttgaatcaacgtcagcgatgcgtttgtaagagacatcgacaaggtcagagacgttgatttcttttgcagcaagcaactcatgcagttttgttaacgaatgatcaaataatgacatgcttgtcctcctgtctatgcttcaatcttaaaataccgacggaacccggatttggccatcttcatggtccggtgcatttttcagcacttcttttacttcgagccctttttccggtttatcttcacgtaggacattatgcatttgcaacacatgtgtcgtaggcacgacgccttctgtatcgacttcattcagttgttctgcagcagtaatgatgtcttcaagttggttgcggaatgtttcagcctcttcttccgtaatggcaagccgggccaaatgggctacatgtttcacttgttctttcgaaattcttgacattttgacacctccaaaacggacttgttgacaatatgattaatgataccaaattgctgcaaggcaagcaacttaggtggtatgacggataggtatgtatgaaaaggctccagttaaatgggcatatgtgaacataagtctttcatacctatgcccttattccgactcactccgcttgacttgcggccaacttccggccaatgacatttgctgaaattggttccttgccaatctctctcgcccaaacagacaattgtccaatatgatggatttcatgggcaatgatatggcgcatgacgatgccccacgtgtcatcgtacaccttgccattttcccccttttcaacataacggttttcttccattttctcatcccagcggtctacaaacgcctttacttccacatggtatgcttggtcaagcgcgcgcactttcgctaaacttttaaaggaatcaaagtcttcctctgggttgggctttccttgcaagtcgcgaatccaactccattccacatcgacaatatggaacaacgttcttaaaatgctgcccacccctcctgtccgctcagcaagcagctctttgtcgctaagttgttcacaccactcataccactcttgacgaacttgccaattgtattcaaaaaaccgtttcattgtgttcacccctgaatcttatgtcttgccgtgctttattttatctcaaactgtgccgcaagcgtgaaactagcatcgatcccgtgtgcccatacttcttttaccgctctgtacttgcctgggctaagtcccccaatctcaatgtcgtcacggtgctccccaccgattggcaattcgacgccaatttcaataaaagccatttcgagcggcaccgttcgccactcttggccgacttgtttttcaatcgtataatcgacacctaaagataatgggacagggccttcattatgcaaaacaagcgttgccggtgaatcactagctgaataaacgctttcggtaaatgccagtgtcgcattcgcttcaggaatcgggacatagatataagacagtttggtatcttctacttcgccatcagcatttaacatttcaacgctcaataaataggctgcattctctttttcaggcagcgtgttctcatagatttcggttccgctcgactttaccttgtctacataaatgatgtcttcatcaattaaggcgcttttcgcaattccatcccgttccgtcaactgaatgcggacatcacgctctaccggttctccgtccattgtatggccaaaaaagataatttcaagtttgctgccagcttgttgggttcctgtagtaaggccatatcctcttattgggctattttcttcttgtgaaaaccaaacgccagttggcaaatcatattccgtttgctgccaaacctcctctttaatgtcaaataaatcggtaaaagtagcatctacagcaagcgtatcggttaaaccatcgccaattttagacggcaattcgccatgcccttttgcccaagttgcttcatcatcaagatgagactgttgatcggaattagacggtgagtctgctccctgtatactcgctgtgtcttgtccgcaactagcaagtgtgactgccacacttgtcgatatagcgacaagcacaatgtttcgaaaacggttcatgcccgttcacgctcctttattctattatacatataaatgagaaaaagagggggccctgcaagtcacgattgggtggcgtgaaaagaagaatggaaaggtagcaaaggaaaaagggaaagactcgtaaaggggtaagaggaaaacgttcaagaggcataaaggagtaaaagccgcttactttgtccgctctttaatagcgtcagcaatagcagttaatgctgcggctgttttcatttggctgtcttcgactttagaaaggcgggcatttgtttccaactgggcagtctctaagttgccaatgcgtcgattcattacgacatgctcttctttcatttcatcaaaacgtttgtccactttcaaaaaacgggtttccatattgcttttcatatcatcaaagcgtttgtccatttctgaaaagcgactctccacttggtcaaaacgggtttccatgtcatttttcatgtcaatcatcacttttctcatctctgtgactagggaaaacaactggtcaaaatcacggtcatttgtcgtcattttgtgattacacctcccatttttcatcattataaccgaggaaagcataaaaaagaaaggcttacttccgtgtttttgccatttgccaaaaacacatttccacccgaaaaaagttgcacaaaaaaaacaaggcaaaccacgggcttgccttgttcagtttgtagccaattgctcacaacgaacaaacgctttctatcatgtattttttaacgcgatccttttatataaggcttgcctaacgcttttggaccttctgcccggccaacaaaaccggcaagggctaaaatcgtcagcacgtaaggggcaatcagcaaaaatacaggcggcacatcagaaagaaacggcagctgctggccgactacacccagtgcttgggcaagtccaaagaacagcgttgcgccaatgacgccaagagggtgccatttgccaaagattaacgctgccagtgccataaatccttggcctgtgattgtagttgcggaaaagttgccgctgaacgttgctgcaaaaacagcgccgcctaggccggcaaacacgcctgacaacatcacgccgatatagcgcattttgactactcgtatgcccattgtatccgcggcctgtggatgttcgccgacagagcggagacgcaagccaaacggccgataataaatgacataatagacgagaaaagcaagtccaaacgcaagaaaggatgttgcatacacatttgaaaaaaacaacggcccgatgacaggaatgtcacttaaacctggaatgttaaaacggtaaaagcggttttcaatataagcggtttgcccgctgccataaagcaaattgataatatagaccgaaaggccaactgcaagaaagtttaaggcaaccccacttacaacttggtctgcttggaaatggatcgaggcgactgcatgaaacaacgaaaacaacgcgccgaccacagcggcgacaagcaacccaatccaaacagagagagcgcctccccctgccgcctcaagagtgagcgttgtgacgatgacagaaaatgcccccatcaccatcaacccttctaagccaatgttgacgacgcctgaacgttcactaaacaggccgcctagagcagcaagcattaaaggggcagccgaataaatcgtcgttgaaacaattagggcgagcacatccatcgttacttatccccctttttccgcttcagaagcatgagacgaacaacatagcttgaagcgacaaagaaaataatcagtgcaatgacaatgctaatcagttctgtcggcacatcggtttgctggttcattgtcaatgcgcctgttttcaagcctccgaataaaaaggcagacaagaacacgccaagcgctgtattggcacctagtagtgcaacggcaatgccttcaaaaccaacgcctgtaaagcctgaaagaatgctcatatatccaaaagttcctaagccttctgccgctcctgccagtccggcaaatgcgccagaaatggccatcgaaagaatgatattgcggctaacattcatccctgcataagtggaagcatttgcatttaaaccaactgcgcgaagctcatagcccgctgtcgttttccataaaaagaaccacataaacaagcacgcggctactgcgattaaaaagccataatgcaaccgtgaatattccgtaagagactgaaagaatggcgaagccaatgaggcagaaggataaatgctttctgtccgctcgccaggtataagcaagtaagtgcgaataatcgcattagcggtatacaatgcaatatagttcatcataatgctgacaatgacttcatggacatgaagctttgcttttaagatgcctggaacaagtgcccacagcgccccagctaccgccgcagcagcaatagaaagtgggaggtggatggccatcggcgcttcaaaagcggctcccacgtaaacggaggcaagccaaccgacaatcagttgcccttctacgccaatgttaaacagccctgtccggtaagcaaacgcaacagcgagcccccctaggataagcggcgtcatcgtccggatcatttcgccaaaataatagctgctgccaaaaatacctgctaccaacgccccataagcttcaatcggattatggcccgtgatgatcatcacaatggcgccgacaagcagtccgagcaggatggcaaaaaggggaatggcaatatgcatagcttttccggccagcaatttattcaagttcacttgcttccactcctttttcacggctgcctcctgccattaacaggccgagctccttttcatttgtttggtcggcttccacaatatcgacaatctggcctttatggatcacggcaatccggtcgctcacgctaagaatctcatcaagttcaagggacatgagcaacactgctctgcctttgtcacgttctttcacaagacgttcatggatcgtttcaatcgcaccgacatccagacctcttgttggctgtgccgcaatcaacaggtctggagaacggtctacttcacgggcaataatcgctttttgttggttgcccccagacaaggctcttgccgccgtttccacagaaggcgtccgtacatcgtagtctgcgactaattcttttgcttttgccttgatggcttccgcgttcagcagaccatttcgcgagtatggcgcttggtaatacgtctgcagcaccatgttttcttggacgctgaagtcaaggacaaggccaagtttatggcggtcttcaggaatatgaccgacgcccgcttccgttactttgcgtgggctgagatcagcaacgttttgtccgtttaaccgaatttctcctttttctaccgggagcaagccggcaatcgctgcgattaactccgattggccgttcccttcaatgccagcaagaccgacaatctcgcctgcgcgaattgttaaatcaagctgttggaccatttccacgccacggccgtctttgacataaagattttttacttcaagtacagtatcttttggcacagccggcgttttttgtacatggaaattgacttcacggccaaccatcatttctgctagctcggctgttgtcgcgcttgccacttcgacggtgccaatcccgcggccgcgtcgaatgacggtacaaacgtcgcaaatttgtttgatttcttttagcttatgtgtaattaaaatgatggatttgccttcttcagtcagctttttcataatatccatcaattctttgatttcttggggcgtcagcacggccgtcggttcgtcaaaaatgaggatgtccgcgccacgatacagcgtttttaaaatttcaatccgttgctgcatgccgactgaaatatctttgaccaatgcatcaggatcgacggcaaggccatactgagcagacagggctgcaatttccttgctcgcttttttcttattgatgcggccgccttttgtcggttccatgccgagaatgatattttccgtaaccgtaaacgaatcaacgagcataaagtgctgatggaccatgccaattccaagtttgccagcaacatttgggcttgtgatcgctactttttcgccccggactttgatttctccttgctctggctgataaaggccaaacaaaatgttcattagtgtcgactttccagcgccattttcccctaaaagggcatggatttccccttttttcaagcgaagattgacgttatcattcgctacaatgcctgggaattctttgcggatgccgttcatctcaatgacatattccataggatcaaacgctcctttaatgaactaaaaagaaaggctagtttttcacactagcccatcttgatttcgtttatccggcaaattcattaaactcgtcatcggtttttggcacttccagctcaccgtcaagaatttgctgcatataatcgtccatgctttcgatgatttcagggcttaagttatcgccagtcgtcgcgtaatcaattccatcatcttcaattccatattcaaggatttcgccgccagggaagctgccatccatcgtttgctgtgtcacatcttgaactgctgtatcgacacgtttgatcatcgacgtaagtgtaacggattggtcgccttcatagacgccctcttcatattggtctttgtcaacgccgatcgcccatacttgttcgccatttttgacacggttaatcgcctctgtaaacaggccgttccctgtgttccccgctgaatggtaaatcacatctgcacctgtcgtatacatcgtgttggcaagctgctgtcctttttgcgggtctgtaaatacttctgcatattggacgatgacttctgcgtcggggttcaccgcatgaacgcctgctttaaagccgttttcaaacttcttaattaactcgctttcaacgccgccgataaagccgactttattcgtttccgtttgcaagcctgcggcaacgcccactaagaaggagccttcgtgctctttaaaagtaatatttgctacgttgcttaatggatcgccattatcatctgttacgactgagtcaatgatcgctaattgtgcatcttcgttttgctgcgccactgttttaacagcatccgccatgagaaagccgatcgcccagctaatatccgtgttttcacgtgtaagagcgcgcaaattcggttcaaaatcttgggcagtgcttgattgtacatagtcatagtttttgccttcttccaacccgttagcttcgccaaaagctttcaagccttcccaagaaaattggttgaacgatttatcgtcaatgccactaacgtctgttaccatttttgcagtaaaatccgaactttctcctccaccttctgaacctgcattgttttccgaaccatcgccttgtccacatgcacctagcacaacaaccgatgcgagacctaccgataatgccttgatccattttttcacgtgagaatatcctcctataatgacttccagctgctgctgaaagcgtttttcttcatgtggcaaggaataacggcaacgtcattccttttttgccagcaaacatactatagcataaaatcatcatataaaaaacgaacatttttagcattttaattgataatgtgaataaacggctcccgatctggatgatacgagacaatgctctcaagtgaaccggaaagcgctgaaatgtttacatctactggtatgttttcatagtattcttcgacttggccggcaatgtattgggttaaggcgacaacttctgccttgcctttatattggatattaacgtcaacattaagcttgaccatttgattgtcttcataacgtgcacggccaacgacgccgatattatttgagaagaacgcttgcacgtcagtacggaattgggtaaagcgatccgcatcgtcacgatgatcttcattggctgcaggtgaaggaaactggacatgctcttggttaatattttcccaatgagggttttctcctggttcaaatgtgcctactttaaaaaaatggcccgcgttgacagagtctttcggctgttggctaaatagcgccacgacaattggcacgtcgctcaaatcttcttccgagtcaacgccttcgcgcatccgattaacaatcgtttcagcaaactccattcctttttcctcttggactgcagctttgatcggcacagaatctgactttccgtcatggctaaattcatattcgctgtataacgataagccgagcgcgacgccgcctgttgaatagtcgccctcatcatttacattcatgtaattttgttcaagtacgttcgctagaacccaagggctgtttttctcctgttccatcggatcgtctccatcgcccaaagatggatttagcccattcggattctcttcttcatcgtagcggagcaaccatgactttaccgtttcccgagaaagatgggtgccttcctgaaaaaagtaatcgttaggatcgaaccgttctttggcaatgtcctccaaccctaattcaagccaatccaaatctttgcggctataacctaagtcaaggccatagccacgtgtttgtccatgcacataagccccatcttgcaggacgcttgcataatagttctcctctgatggtatcgatgggacaacggttaacgagtcatccgcttccgaaacatcaggcgtattggcctcatcatcctcttcgccgccaaagaaattgcagccagagaggagaacagcgcttgccaaaccaagtatccccacacgcttcatctttcaatcccccttgttactgttcgctttgttcaaccgcttgtgtaaactgttcctctgtccaaatctcaattccaatgctttccgcttttttttgtttagagcccgcatcttccccagcgacaaccaaatcggtttttttgctaacactgcccgtcactgtgccgccgagcgcttcgattttttcctgtgcttctttccgcgtccactgggacagttttccggtcagcacaaccgttttgccggcgaataccccagcttcttcggcaatcgctgcttttttcggtcctgtgtaagtcatgttgacgccagcattggctagtttttctaacaacgtggccacctctggcttttgaaaataggagacaatcgagtctgccattttctcgccaatctcattgacggcaagcaattgttcaaacgttgcctcttggagccgttccatagtctcaaactcatatgctagcgttttcgctgccttcgcaccgacaaaccggatgccgagcccaaacaacagccgttcaagcgaattttcttttgaggcttcaatcgccgccaacaaattgtcgacagatttttctcccatccgttccagctggagcaattcctcacgttccaacaaatataaatcagccacatcagcgatcaattgatgcaaaaacaattggctgatcactttttcgccaaggccgtcgatgttcatcgcatttcgtgatacaaagtggataagcccttcacgaatttgcgctgggcacttcgggtttaaacagcgcaacgccacttccccttccaagcgttccaaaacgctatggcactcaggacactctgtcggcatatgaaagtcaacttcctcgcctgttcgcttatccgtcaaaacgccaacgacttctgggatgatgtcacctgcttttttgacaatgaccgtatcgccaagcttgacgtctttttcgcggatcaaatcttcattatgcaaggaagcccgccttacggttgttcccgcaacaagcacgggatctaatagggcagtaggcgttactacgcctgttcgaccaacatttagttcaatatcgcgtaaaactgtcagcacttcttcggcaggaaacttaaatgccgttgcccaccggggactctttgctgtaaagcctagtttttcatggtcggccaaggaattgactttgacgacgactccatcaatttcatatggaagctcatggcgccgttcgctccatttttctgtataggcaatgacgtcctcaatcgtttcgcattctgctgcttcttcgtttactttaaagccgagttctttcaaaaacatcaagctgtcaaaatgggtttgcacgtttttgccttcgacttcgccaatcgagtaggcaaataacgataaattccgtttggcggcaattttcgggtcgagctggcgcaaggagccagctgccgcattacgagggttggcgaatttttcttctcccgcctgttcttttgcttcgtttaaacgttcgaatgatgcttttggcatatatgcttcgccgcgcacctcgatcgaataaggctgttttaaccgcaaaggaatggcaggaacggttctcaaattgtttgttatatcttcgccaatcgttccgtccccacgagtcgcaccgcggacgagctttccattttcatacgtaagcgatacagcaaggccatcaaattttaattcgcacacgtaggagacgtgctcgcctaccgcttggcggacgcggcggtcgaacgcgcgcaaatcttcctcattgaaggcattggacaagctcatcatcggcactcggtgggccacttttttaaaggacggagccggcggcccgccaatgcgtacgcttggtgagtcttccgtaaccaaatctggatagtccgcctcaagttgaagcaattcattcatgaggcggtcatactccgagtcggggactttaggcgtatcgagcacataataatggtagccatagtcctccaataggaggcgcagctctttaagccgtttttctgcttggtgcttgtccattggtctgtcttcctctctaagctttcgtgataggcgcaaatttggcaaatagccgctttacacccgtaggcggagtgaaggcgatgtccagctcgatggaatccccttctccttttatgctgacgactgttcctgttccccattttttatggaccgctttgtcgccgactgaccagtcaaaactttctccgcctgttactgttactcgtggcgatccgctcttgcctgcaaagacgcttgagcgtacacgggcagctgcacttgcggcggctggctgcctagaaccccctgttccccaagcgggcatttgactgtcttcttcaatcaattcagccgggatttcagcaataaagcgggaagtcgggttggtattcgttcggccatagagcgtcctcattttggcactcgtcaaatagagccgtttttcggcacgggtaatgccaacataggcgaggcgccgctcctcttccatttcttcttcctcaaacaaggaacggctatgtgggaacaccccttcctccattccaatcaaaaagacatatgggaattcaagtccttttgctgaatgaagcgtcatcagcgtaatggcctctttttttgtcgcttcctcgtccttatcgagttggtcaatatcggcaacaagggctaagtccgtcaagaaagacacgagatctttttcttcgctccgcttctcaaactcttgggtgaccgtaataaattcgtcgatgttctcaagccgagactgtgcttcaatcgtctgctcgtttttaagcatttcgcgataaccggttttatcaagcaattcttccactagctctgtcacggaaagataatcttgcatgtgcacccagttattcacttggtcgcgaaattccacaagtttcgtccgcgctctggccgtaacgccgatttgctccagttccccaagcgctttgaacatcgagagcccatgggcatcagcataagcagcgatcttgtctaccgtcgtcgcaccaatgccacgcttaggcacattgacaacacgctgtaagctaatgtcatcatcagggttggcaactaagcgcaagtaagcaaggacgtctttaatctctttgcggtcatagaacttagtaccgccgacgatattgtagtcgagattagatttcacaaaatattcctcaataatacgcgattgggcattggttctgtacagaatcgccacatctttgtaagaaaatcctggttctgctgctgcttcttttattttttcgacgacaaactgtgcttcagcttgttctgtagccgcctcgtatacgctgattttcgctccttcgtcattttcagtccaaaggttttttggcttgcggttgccattgttagcaataacactgttggccgctttcagaatcgtttttgtcgaacggtagttttgttcaagcaaaatgacagtcgcatccgggtagtctttttcaaaggagaggatattttgaatatcggctccgcgccaacggtaaatcgattggtcggaatcgccgacaacgcaaatgttttgcagacggtcaccaaggagtttcacaaggcggtattgtgctttgtttgtatcttgatattcatcaacatgaatgtactggaatttgcgttggtaaaaatcgagcacttccggcacttcgttaaacaattggatcgtcttcataattaaatcatcaaagtcaagtgcgttgttttgtttcaatcgtttttcatattcactatacacgtcggccgctacttgctcaaatacgcctgaagcgatttgcgcaaatttgcttgccgtttgcaattcgtttttagcagcagaaatcatccctaatatcgcttttgggtcaaatttcttagggtcgacgttttggcttttcaaaatttgctttatgaccgaaagctggtcagatgaatccaaaatcgtaaaattgcggctgtagccgatccggtcaatatcacggcgcaacatccgcacgcacatcgaatggaaagtggaaatccaaatatcttcagctattggtccaaccaactgggccaccctgtctttcatttctcgcgctgctttgttcgtgaatgtgagggcgagaacagcccaaggcggcgtcgaatggcgccggagcaaataactgatccggtaagtcagcacacgggttttgccgcttcctgcacccgccattaacagcaaaggcccgttcgaatgggtcacagctttttgttgctcagggtttaactcagatagcatccgttcaattattgtatcttgcatgtcactcaccgcctacctgcatttatgttccttgacggcctccaccgtcttaagcgcttctttaagattttcataaagcccattgccgacaacgacaacatcagcatatgctgctatctcagaggcatctgctgcattttttatcccgcctccatagatgagctttgtcttttccaataccgcgcttgcccgtttgacaacatcaatcggcccttttttgccgctgtattccaaatagaaaaaaggatagcggtacatatgctctgccagccgtgcgtaagcaacaacatcttctatatccaagtcagtctgggcattcgcatgattggccactcgtgcttctccatttaaaacacagtagccttccaacagcagttcttgccaattaatgatttcgccatattctttgacagccttgtgatggtggccaatgacccaactaacatgttggctgttcatgacggatggaatcaaataataatcgaaccctggcgtaatcgcttcaaggtccgatacttcaagcgcacatgtcactggaaaccggcgaatgcgggcaaaaagagacaacgtgttatccaatgtgacgttgtccgttccgccaacaataatcgcatcagtacctgactcgcaaacggcttcaagcgcttcatcggttatttctttgtttggatcaagtttaaaaacatgcgcccattcatcataatttttcatgttaagcgccttaaccgcaggcacgcccctcctttattgataatcaacaaacacttatcctcttaaaaatgcaaaacatacaaactggcatgccacataccgagtatacgtacgttcgttctgtctgtcattatagcaaagttcctactcgttgtcccgtatccatctgttgaaaaaataagggatttcactgaaagttgccgcctagatgattagacaaaaaaagacctccgccagtaaggcgcaggttaaatgtagggggtctatatcgaccagacgtgtatcgtagcacgttatctaaatgataacgaaaatcattatcattgtcaatgaaaattcgctaaaaaatttgcttctttctgttatgttcgatgttgcccacgaaatcccgataatatttataaagataaccagcactatgcgagtgctggttgtctcagactgtaggcaaacgctcgcatacttcgtcgtttgcctcactcatctgctttgaaacggtcgtttcatgcgcaagaaaaccgctgctcatgaacccacgttctattcgcatcttccctcggctgcactcctcgtctgacaagcgttttctatcagtctgcctgttgttgtggccaacaccagggaaccagcactatgcgagtgctggttgtctttcgtcctgctgttggttttggtcttttaacagatcatacgtcaaacaaacgggtttgcctgttcgtggatccatgacgatgttggcatcaatatggaatacatcgcggagcacgtcttggcacattacctctgctggtgcgccttctttcataatttttccggcgcgaatcgataccatgtaatcggcaaagcgtgctgcatggtttaaatcatggataaccatcacgatcgtccgctgttgttctttgtttagtcgctccaatacttgcagcacttcgagttgatgggccaagtccaaataagtcgttggctcatcaagcaaaagaatatccgtttcttgagcaagggccattgcaatccatacacgctggcgctggccgccagaaagggcctcgattggccggtctgcgtattcgctcatattggtttgttccaacgcccagtcgatcatggagcggtcatggtccttcaattggccaaacccgcgctgatgagggtaacgcccatatgcaaccagttcagaaacggttagcccgcttggcgcttcaggagactgtggcagtaccgccatctttttggcgatttcttttgttgactgtttatgaatggacttcccgtctaaatacacggctcctctggatgcttgaagaatacgggaaatcgtttttaaaatcgtcgatttgccacagccattcggcccgacaatcgtcgtaattttcccatctggaatttgcaaatgcaagtcattgacaatctctcttttttcataagcaatcgaaagcttttcagtcactaaacgtggcattggacttcctccttgtttatcgggttttcatcaacaaatataaaaagtatggcgctccaagaatggcgataacaatgccgactggaatttccgaaggagccaggacgttgcgtccaatcatatctgcagtaagcaaaatcaatgcccccattaaggccgcagccgggataagcacttggtgtttcggcccgacgaggcgacgtgcaatatggggagcgactaaacctaaaaaggaaatgccgccgccgacagctacggacacagcagcaaggctaacagctaaaacaagaagcgttcgccgttctttctcaatcgggacgcctaacgacaccgcggactgagtgccgatttgtaacacatttagcgttctcgctttaaaaagcgtaatcggcatcaaaaggaggatccatggcaagactgcccatacgtggggccacgtcgtcccccaaatgttccctgttaaccaaatcgttgcctgcataaaatcattcggttccatccgcaattggatcacgatcagcaaggcactaaatgctgcatttaaaccaatccccaccaacactaaccggactggcgtaatgccttttttccaagccagtatataaatgaggaaagcagcaagcagtgcaccgcttagcgcaaataacggcatcaccaaaaggtttgcattgccaaggcccgttaaagaaccttgtacaaaaaagataaacaagacaacagcgaggcctgcacctgtattgatccccaaaatacctggatcagccagttcattttgggaaatgctttgtaaaatcgcgccagaaacagcaagacctataccaaccaaaagggcgattgccattcgcggcaaacgaaactgaaacaggacgagttcatctcgggcagagccatagccaaacagcgtttttgcaaccgcatcggggctgatccgaatcgcgccagtctgtaagctgactaaaaacacgatgacaatggccaaaaacagaatcgctagcactgcgattggacgatttttcaatgcttgcttcatgaaagccccctcccttcacgccttgcaaggtaaaggaaaaacggtacgccgattaacgcggtcattgcaccgaccggcgtttcatagggggcatttaccaacctagcggctaagtccgctaacactaacagcaatgctcctaatacagcagtgcatggaataatataacggtaatcgacgccaactaagcctctagtaatatgggggatcactaagccgacaaatccaatcgagcctgcgactgccacaccagcgcctgtcaataacaagacagctaccacaccgagcgacttaacaagaaaaatccgctggccaagccctcgcgctacatcttcgccgaggctaagcaccgtcaccgactttgataaagcaagagcaaggagcaaaccgatcatggcgactggcacaatcaacttaatgttggtccaattcataccggataaaccaccggcaaaccaaaagcttatatcttgggcgacgtcaaaatgaatggcaatgcctgaggaaatcgcgcttagaaatgcgccgaccgtcacgccagctagcgctaacttggccggcgtcaagccccctcgtgccagtgacccgattgcgaacacaaacgcagcaccggcgcctgcgccgataaaagaagcaaccattaaatgaaagccagagacatgcgcggcaaaagcaaacataatcgcaatcgctaacgccgccccatccatgacgcccataatcgacggttctgcgagggcattgcgcgtcatcccttgcatgatagcgcctgagacagcaagaaaactgccgactagcgccgcccctaaagcccggggaaggcggatttcttggataatttgatgttcggtcaatccggggtcaaaagagaaaaccgcctgccaaacggttttaaagtcaatttgcgctgccccataagaaatggaaagaacgagcgcaaacacaagaaaccccaatccaataacgaggacgcttattgccgctaacggcttagaacgtgccttcgctttttctaaatcttgttgtgcttccttagcctgtgtgctcatttcgtgttttttccctttaacgttcgatccgtcatttttgatggtattgataatcattatcataccatggacgatcaagcgggtaaacaaaaaaaccagcattttgctggttttagaaaactttttattcattaaaacggcatgcagccaaaaaaagtcgaatgatttagcttccgttctttggtgttttcgtattggacaaaacgccaaagccgctaattatataaacaacaccttgcaaagggcaatcaacccgccccataaaggaatgctaagagcaagagcccagcctgcgcctacaaccatattctcgccaacttcgtattgaatatcctcctccaacctcgacgcctcctttttatcttgctgctttcagcataagggctatgcatgtagccagcattaagcaatcgtaaagattctgtaagccttattagcaggagactttcactaaagctggcgtctttttcgaaatgttttagcctcatgtgctacacttacgatagcctgttggatcatacatttcttttcgctaaacaggctcgcttttccttcggctctttgttgatccatacataattcgatttaggaggcaaatgatgtcagcaaacaaacgaaaagaacggccgtcattccttatgatggtctatatgtggctctttattttggtggcggttgtcaacattaccggaattgcatcaacgaagttatatgcaagcatttttccctttttcattgtttctctcttaaatattttccttgctgcactgctcatcctgcaagcattaaaaacaacgagcaaaagtgaacgaaggctttccattatttacttgattggcgttgccgttctagcggccgtcacgtttttccgctttttgtttatgcaatcaagctaacagtgaagcaatcgcgcctctgtttgcgcgattgctcaataaaccttgatctcatacgatgctttaaatgtttcattggcaccaatttgttggatgccctttttctccgctaaccgccctgttgtatcaaccgtatcggcaaccccaaaccatggctcaatacaaacaaaaggagcgttcgttttttcttccgaatcatatgctgaccaaattccgacataagggaaacgcggaaaggagacaacaattttctcttcggggcgttgttttggataaagcgcgacttcgtcgagatggctgtagacgagtgcgtcatgttgaaagagcgaatcagtaagcccgatattttctagcactggcacgatttccggtttttggaccaaaccgttcgaaagggcataacgttcgatttgcttgccttctgctgctttaaaggagagctcatactctgtgaatgtttcttcagagcgaaagggaaccttaaaagcagggtgcccaccgattgaaaaatacatctcttcctcattgtcattgacgacttcccagcctacgatgagcgtatgtccgtttaactggtacgataaataaaccgtaaattcaaaaggatacacatcagcaaactggcctgatgactcaaaccggaatacagctttatcgctttgcaaatcgtcagtaacaaacatttggtcgcgcaaaaacccatgttggctcagttgataagactttccgttgtatgtatacgcgccatcttttaaacgcccaacaattggaaacaatacaggtgcgatccgcccccagtacgttgggtctccgctccacatcacttccctgctttgttctttatgccaaatgctccgaatttccgcccctttatttgcaatttcaaccgttaatttatcattttcaataatgatcatatatagccctcctatcctttctctcttgtagtatgacggaatggactgaaaatgcaactagtaccgtcctttgcaggattaatcaaactaacctgcgaataaaatacaatatgaaagcgcattcaaaagaggggaggaatttgatggattccataccatccactggccaggcgccaaaaaaacggcgggttctctttatttctggagcagcgattttggtcattttgcttgcaaccctattatgggcgtacatgcaaatcaaaaaaccgctgccgcaaacgacaggagaactcgtcgtcaatggattaaatgcttctgtcaatgtgtatcgggatgcgcaaggcgttcctcacattgaagcccaatcagacgttgatttatattttagccaaggctatgttactgcccaagaccgcttgtttcaaatggatttaagcagaaggcaggcgtcgggacggcttgctgaagtaatgggagaaacctttgtggactcagatgttttctttcggacattcggcttgcgccgggccgctgaggcatcggcatctgcctatgacgctgaaacataccggtatttagaagcttacgctgatggcgttaatgcttttatcgaatacgcccaggcaactggcacacttccacttgaatttcgtttggccggctatgagcctgaacaatgggacccgattgactcgttaacgataggaaaacatatggcatacgacttaggcggcaattggcaaagccaagcgttccattactggctaagccaacatgtaagtgaagaagaagcactcgatttgcttcctagctatccagaagaagggcctgctgttcttgacttggcacaaacgattgatatggacgtcgaaacagcatttgccaacgtcggctctaaattgccacacccttttaacggcagcaacaattgggtgctttcaggggaccggacagcgactggcatgccgctactggctgatgatccccacttgggattgggggcgcctagcatttggtatgaaacacacctaacatcgccgactgtgaacgttacaggcgtaattttcgctggcgtccctggcattattcttggctcaaatgaaacgattgcctggggtgtcaccaatgtcggccctgacgtacaacagctctattttgaacagcgcaaccctgaaaaccaaaatgaatttctctatgacggggagtggtataaagccgaagtcatcgcagaagagattaaaattgctggtgaagagcctttttaccatgacgtggttttaacgaaacatggcccgatcctatccgaatatgcccacgtagaagacgagtccgagtatgcgttatctttgcgctggacggggcacgatccaacgacggaactaaaagctgtactcgattttaaccgcgccgataattgggaccagtttaaggaagccttaacccattttcatgcgcccgcacaaaattttgtgtttgctagcacggatggcacaatcgcgtaccgagccaatggcctgattccaatccgtgcaaacggagatgacgcattattgccagtgcctggctgggacccggcttatgaatgggaagggtatattccttgggatgagttgccaacaatcgtcaatcctgaatcaggaatcattgccaccgctaataacaaaattgctggagacgactatccttaccacatttcccacacatgggcccaaccttaccggcaacagcgtattattgaggtgctcgcagcaaaagacaaccatactgtaaccgacatgcaagcattgcaaatggacgtcgccaatttgcaagcaaccaacatgcttccccttctgacagaagcgttaccggctgagggactccgcgctattgacgaggagggattagatgttctcgcagaatggaaccaatttgacgagcgcgaagaagctggaccgctattgttccatttttggatggaagaaatcgaaaatttgttgtttgccgctaaaattcctgctgaaatcaacgagcttttttacggccgtgctggtgtcgtcgatgaattgctaaaacgcgcagcaacgggtgatccaggtccatgggtcgagggcgctggcggttttgaagcagtcgtccttcaaagttaccaagcggcaatagacaaagcggcgcgtttacaaggaaatgcgccagcaaaatggcgttggggcgactttcaccaagttgaatttagccatccaatggcagcaatcacaccgctgaattacttatttgatcgggctcctcttccagcagacggcagccatgttacgacaatggcggcaagctacaatcgcgaaacaggcatcgtcaaccacggcgccggttggcgtggcgtatttgatttaagcgacattgaccatacgtaccacatcgtcgctcctggacagtctggccatgtcacaagcgagacataccgctcgcaaatggaagcttggacagagggtcattaccatacgacatcgattcatccggcaacgtataagaacaacagtgacaaactcgaattacgttcccagtaacaatagaaggactggcgttctggccagtccttcagactgcagacaaacgctcgcatacttcgtcgtttgtctcagtcatatgttcatgaacactcgttctattcacatcttccatcccctgcactcctcgtctgacaagcgttttctttcagtctgagtgcggttatcgactttgtcgacaaccttaaggactggcgttctggccagtccttaagacaatgcttatatacttcgtgtttttattgttcgacaaaggcaaacgcattgacatcaaacagcccttttgacgtcagtttaagtgcggggatgacagggagtgcaaggaaggccaacgttaaaaacggatcgattttttcttggtagccgagatggacgagtgattgctgtaactcattgagctgttgtttgactgtttccgctgaatccgttgacatcaagccgcccaatttaaggggcattgccgcaagcacgttgtttccctttacgaccgccatcccaccccctaagccagcgacatgatgaatggcatggtacaaactttcatcatctgcccctacagcgataagattgtgagaatcatgagctacagttgcggcaattgccccctctgaaaaaggaaagccctttacaatggcgagtccgatatgtcccgtcgcctcatggcgttccacgaccgcaagctttagccatttgccgccaggttgaaaaataccgttttccgctggaacggacgccatcgcttttttcgtcacaatcgagccaagcgtcgtttcaataacaggggtcgagtgagcgtttttcagttttagtgttaagtcctctcgtgcaaatggagcaagatggacactgttcaacaatcgctctggcacggggtaaggagtgcggatcgggctcgttagttcgcctttttcggctacgagcatgccctttgcatacacggcatcgacttgaaacgtggaaaggtctgacacgaacagaaacgatgcttcttttccaggagcaatggcccctttatcatcaagttgaaagcattcagctgcattcaaggtgccgatttggattgcttggagtggatccatgccaagtgcaatcgctttgcggacattaaaatcaacactgccttctttcagcaagtcatctagatgcttatcatctgtcgcaaatgcaaacctccgtgcattagctgctgtaacagctggcaagagcgcctcgatatcacgcgcagccgtcccttcacgcatcagtacataaaatccacgctggactcgtgctttggcttcctcagcagttactgcttcgtggtcattgtgaatgccagctgtccgatatgcatttaatgcatcgctatttagccctgctgcatggccatcaatggggcggccctttgccttcgccattgcgattttttcaagcatgtcgtcatcgccatttaaaactgccgggtagtccattacttctcctagcccgtatacgccttcgttcgcaaaaagcaagcgtacatcttcggcagaaagggaggcgccattttcttcaaaagatgcggcaggcacacttgaagggacggccattttaatatcaagcggcaagtctttagctgcttcaaccatgtatgtcaccgcttctacaccagcaacattagcgagttcatgaggatcggcaatcgccgtaagcacgccttttggcacaaggacaccggcaaagtcttcagggcgaaccatcgccgattcaatatggacgtggccatcaataagcggagggcatacgtatttgccttgggcatcaatcactgttttgccttctgtataatcgccaatgccaacaatgtagccgtctgtgatcgcaatagaagcttcatagatggttaacgtataaacatcaatcagtttgccgttaatgaccaaaatatcggccggctcctgtttgcttgctgcggcaagccgttttttataggtagcgtgatggcgatccattctcgttctccttttgtttttaacgtctattgtagccgatctcccctatttgcgctatcaaaaaaacaagaaaaagaacgatcctaaaaagaatcgttcttagcctgtagacaaacatgttgcctcgctcataggagatggtgttaatcttgcggctcttcctgcgcttcaatccggtcaagcgccatccggtagctatcgttgccgtagtttaagcagcgtttgactctggaaatagtcgctgtgctagccccagtctctgtctcaattttgtggtacgtataaccatcacgcaacatccgggcaacttctagcctttgcgcgagcgattgaatttcattgatggtgcaaagatcatcaaaaaactcatacgcttcttctaaatttttgagagacaaaatcgacttaaagagctgatcgagttctttgccgcgtaatttgttgatctgcaagcatgtcacacctttcgagtattgtgcaatctctacgatgcgtgtcttttttaaagttttaaagcaccaaagtaattctattttaacgcattatcgccggaaatagtattcctttcttccgaacatcgtagatcccccgttgcgttacccgaatataaggcaagtgcgtagctgaaaaaaactgcaaactatacatcggatcttcaaatttgtagccccgttcccgcaggaggctgacaaacgactgttcttctgccataatgtcttccattggcgccgcggacatcatgccgagaagaggcaagcggacacggccgatcacttcctcattctcgacgagaatgagcccgcccccttgtgcttttaattcattgaacgcttggatcatggatggaatcgatttgccgatcaaaatgatatcgcctgtatacgaataggaactggccatgcccattaccgccgtggcaaacccttttaatgtagtcgtcacaagccatttgccctgcttgtcgaccatcgcaaaaaacgattcgtcatggcctgtcgctaactccgttgccgccgtttccaacgtcgtttggtaaggctttaaaatgaccgcgtttgtcatttcaattcccatcggcatcgaaaaatggagctcatcttcaccaagactccagtcgatgtgaatcgggccaatcccatagtcgccccactcaaatggcgctgtttcttttccttgtggagtgccatttcttaacacccactgccctttagccaaaacgcttttaggcattggattgtccatgctttcgagaaagttcaaatgggcaatgcggcctggagcgatcatgccgagtttatggtcgatattataataacgggcgacataataggtagccataccgtatgcatcaacaggatcaaggccggcttccagggcgattttaatacattggttcattacaccatctttgtagaacgacggcggcgaaccatcagtcgtcatcaaacaacgcccaaaataatcgacgcctagctccttcaattcttcaaacaagcgaggcaaatcagggcgaatcgaagaatagcgcaacgacacagtgtacccgaggtccaaacgacgcacaacctcttcacccgtaatggcttcgtggtcgcacgtcacgccaagaagcgccatttgcgacagcgttttttcagaagctcctggcaaatggccttcaattggcttccgcagcctcgttgtttcctgcatccaatgcaatgtcgtgtcatcgccttgcagcactttcggccatgacgtcagttctcctccttgcaccaccaaatggtgttccagccatgccttcatttttgaattggaaaacatttcatctttgattaactcggtttgtgaatcgtagcgtgcccaccagtacatcgttgtcggcaattcttccagtttctcgatcaaggaaagcgctttctttttttccaagttcaaaaaataaaccaagttgtcattgattagcgtcgtcgtcccacgctcagaagcatattttgccaaactgtatggattatacagttgaaatggatgggcgtgatgttcaatatagccaggaacaatgtattcccctgtacaatcaaccacttccgcatcgcctatctgctctggcaaacttttgccgacataaacaatttggtcatccgcaatccaaatatttgctttcagccatcttcttctggcatggtttaaatacgtagcattttttaaaacgattgttggcgggcgctccccttttacaacacttagatgttcccgcagccttgttttcgtccagcggtgaatccgctccgtgctcatcattatcactcatttcatctcgtcaatcttagttttattttaccatataaagaacagcatttgattgttaaatgtgacatttcttcacatcttttttgctatcggctatttgtgatcctttgtctacttaacattcaaacacacttctaccactatatatccgccattctccttttatgtcaatttctttattgaaaaggaactttaagacaagcagcttcgttacatagagcaaaaagcccttggtagaacaagccaaccaagggccaagacgaggagcggctccctcatgcttgaaggaattcacctttttttcgcctgatactgaccatataattggccgcaggcggcatcaatttctcttccaaattgactccgaatcgttacaggaattcgagctgattttacgacacggtaaaaagtttgcagtttctcttctatggtttggccatagttttcaggcgtacccacagtcggattgtagcgaatcaaattgacatgatagagatggggatagcgattgtttagaatccgtttaacaagtgcttctgcatgtttctccgaatcattgacaccccgaagcatgacataagcaatatatacttttctccctgtctcgtgaatatgctgatccaatacattcattacctggtctaacgggtacttgttgttaatcggcatcaactcgctgcgctgatcatgaaaaggagagtgcagtgaaaacgttaggttcatctgaggaaagctgctagtcattctttggatgtttggtatgatgccaaccgtagagaccgttattcttctaggacttaatgcaaatagttgccgatcgacaagcacattcaaagcatcaaatatccttacattggctagcgcttcgcccatgcccataaaagagacactatctaaggaatgccccttcagataaaaatagagcaactggtctgtcatctcgtctgctgataagttttgttttaacccaatggctcctgtcgaacaaaacgtacaccctaacccacagccacattgagaagaaatgcaaaacgactcccaccctgcttcataatgcattcttacggcttccacttgattgtttcccgctacttttagcaacactttagtgacttgttgagacgttgtttctagcaccggctctactgtaaggatggaaggaccaaattcgtttatgagcgattctctcagtgcttttggcaatgtggtcattttattaaacgcaccaatacgatgtttgaaaatcgcttcagtaatctgtttataccggtacgttggttcatttaaagcattcaaaaaatgttttaatcgttcgtattttgtcgcatgattgacaactttcatttggtacgcgcctcctaatagataaaatttcaatattaggaggctttttcatgtacgggcaccgcttgtttcatgcttcacctactttcatgcatagaaaaagacaccgatttagaaaccggtgtctcattccatcgctcgatataacaaagaagcttttttatagagcccattcatcttaaccctgtatgaaaatgaatagcactccacatcgctactttcttaatttagaagacacgatacttccggtcactgtttttatggtatgaagtttatttatcccatcattcataaaaacagtagccattgtatgttgcctcctttcattcgttagaagcataataacatgttatctgttaatctgccaccactttttgttcgttcatttcactttgtttcgtccattattcagctttcaaatcttcaatcgaatcaatatccatataacttggcactgcgaggccgatgcgtggctcgccatcaaggttgacacctaaatcgtcgactttgctttcatcgaagaagctgccgtgtgtaattggcaaccatgcagccacacttgcatcttggtcgccagattcaagcgatttccacattggcccgttttcaacaacactcagttctacgtcatagccaacttgctcaagagcaagggcaagcacattggaagaagctacttctgaatcccagtttacgagcacaagggagaatgattctccatcgactgtatcaacgccatcaatccattcatcgactttttcttggttgttatcaacccactcttgagcagcttctgctggatcagcgccttcatgcacagcgagcattacttcgttcatgtcatcttcgctccagaagaaattatcaacgacttgatagccttcaggcttctcgctttccaaaccttggcgagcaatcgtatgaatctcttctgtaccgccaaatgaaccttctggatcatccaagtatttcaagtcataggcagcaaatttccaatgtggattccatgccgttacaacgatgggctcgtgtttttggatggccgtatccaacgcttgtgccatcgaagaggaactagatgtttgcaaagtcaagtttgtcaaatcatagtcctcaatcgcccgctctgctgcttgggaaacgcctgcgcctgggtcaatccccgtaatgaccgataaatctttttgaatatcttctttggaaatcataccttcatccgtagagccaactggcttagagtctgaaccgttgccgttgtcatccccatttccgcaagctgcaagtgttacggcaagggccaatcctgtcgctgtcatcgtgacgtgttttacattcatttcattaccccctgaatttaaatctatagtgaaaagagcgattgccgctcttttgccacttattcgctttgttttttgttaaaactttgcgttaaacggtcgagaataatcgccaatatgacaatcgcaataccaccttcaaagccattgccaatgttattttgtccaactgcactgtaaacaacctggccaattccagttgccccgatcatggccgcgatcacaaccatagaaagggcaagcatggtactttggttaatcccagccatgatcgttccccgagccattggcagttgcactttaaatagtttttgcgtgcctgttgaaccgaatgcgtctgctgcttctattaattccgttgaaacttggcgaataccgaggtttgtcatgcggaccgtcggcggcatggcaaatatgacagaagcgacaacgccaggaaccatgccgatgccgaagaaagcaacagctggaatcaaataaacaaatgcaggcatcgtttgcataaaatcaagtacaggtttgataatggcttctgtacggtcgtttttcgccattaaaatgccaactggaacaccgatgacgactgaaatcagacaagccgtcaagacgagtgccaacgtatcaagcatgccgttccaaaaaccaaggctgtcaattaacaacaggccgaggattacaaaaacggtcaagccccatttgcggttcgtccaatacgtgagcgccgcaataatgagaacaaacaaccagcttggcggcaaggcgatgatccagtaaatcccgtccatgaccttttcaatcgtaaaatcaataccattaaaaaaccaagcagcatgctgcagccattctacaaacgcttcaacccaactacctagttccagacggggtagaaaatccattaaaatcaacctcacttcccgataacgctccaagaacggcgcttcttacaataatgccttgtagtttgttgcctttaatgacaacaagaggcacggaactgctcgcaagctcctccatcaattcattaattggcgtgtccatttcgactttcggcacatctgttacaataatgctgtcaatgctattaatattttgcttgattaactccgaaacatcgctcgcatggacgattccaactagctccctattccgtttcgttacataaatgctagaaattttcgcatcgcgcatccgttgcaaggcaacacgcggtccgtctttttccaaattaatcgtttctggacggatcatgacattttccgctgtaaatacttttgagcggtccacatcctcaacaaaccgctcaacataatcattttccggttgtgtgagaatttcttcaggcgtgccaatttgcacgaccgaaccgtctttcataatcatgatgcgatcaccgatacggagcgcctcatccaagtcatgggtaataaaaatgatcgttttgttcatcgtttcttgcaaatctaataattcgtcttgcatatctttccgaatgagcggatcaagcgcagagaacgcttcgtccattaacaggacatccggatcattggcaagggcacgggcaagccctacacgttgctgcattccgccagaaagttgcgaaggataactattttcgtatccttttaagccaacaagttcaagcgacgatatcgctttttcacggcgcacctgcttctcaatgccttgcacttcaaggccatactccacgttttcaatcaacgtccttgttggaaacaagccaaacttttggaagaccatgctcatctttttgcgcctaacttcccgaaggcttttcccatccatcttagcgaggtcctcaccgtcaatccaaacacttcctgatgtcggttcaatcaaacggttcagcagccgcacaatcgttgacttaccgctgcccgaaagccccataataacaaaaatttcaccgtcttcgacttcaaaacttgcttggttaacaccaaccgtgtggccagtttcttttaatatgtccgctttggattttccttgtgccaacatgtccagagcccgtttcggttttttcccaaatacttttgtcaagccctcaaccctaatttttgacaagttttccacctcttcacttcagtcgtgctgctttagaccttgtaactataccttatttacaattttttaatcaaacatgatatatcattcttttagtcgatatttttcatacagtttaaactgtacgaaagcaatggtcggtttccttctatttgctcgcagatgctggcagatgctgtactttgtcatgctatcacctgtttttgaactttgttacactctctataagcaggccactggaggaatgacatggagaaggcaaacgagcatagcaacggcgttgaccagcaacttcaggaaatcagagaacagtttatccatgagctttcgaccaattttcatctatatggcattaacgaatcagtcggtcgtctttatggtacgctattatttgaaaacgatactttaacgcttgatgaaatgagccggcgcctagggatgagcaaaacaagcatgagcactggcattagacagcttgttgatgccaatatggcgcggaaagtgtggaagaaaggcgtccgcaaagacctttatattggagaagaagattggtacgcttcttttatcgcgattttttcgaaaaaatggcgccaaggaatcgaaaacaacaaaaaagcaagcgtgcaaatggaaaaacgcttgcttgcattacagaaagaaacccccgaacaagcagaagtcatcgcttccgacttaaaaaaaatcgcccatgccaaagcatattacgactggctcgaccgctttatcgactttttagagagtggcgagatttttgagcatttggagaaatgatagaaagtctgaatattttatacctggctccttgtataagttttttaaggagctgaggaacaagaaaaaagaagcttgttaatttaagcttctttttttcttataacctttagtctaataaataacactaagccactttattcgcttttctaaacatttctttgttccgacggcttgcgtttaaaattactctctacaattccgaaaaggtagttagcaatgacgcgtgaaaatacgtgaaaataaatgaagtaatagaacagttcctagtatctcaaagtgttatggattgatgtaatttgttcctcctccttgaggttggatggttccatcgtaagacgctgagacaccaaaaataactgtcaacataaataccactactaacacttttttcacattaaaaccacctttttattaaattttttagttcacgttctacaattccataataataaatatgcccagaatcagcaaactttctcattgattgcaaataaaaatccacattttttgtcgcttttcctttataaaataatagaaaaggagtgcttttcccttgtgtttctaagtcagcaataagcgataaagcttgttgattttcgccccgaacaatatattgatgaacacgctcttcactgacgacgttctcaatatcaaaaacttgaccaagcatattgcgtgcaaaaggaaaaaactcattttcgagactaattttgtaatggtccaatgttgaagcagctgcatagttgattgatttctcgtaactatcgatacatagcccgggcttattttgaacgagataaatttggcctaacccgtgataacatgagcttaacatgccgtccgaagatgattgattcacagcagaggccaagaaataattttctgcttcttcaaagcgcccttcattatatagtaagactgagcctattaatatggaatactttgaagccaaaacacttttcatataacaaggttccgtttgtttaaaagcacttctcattctattttcaataatttttgccccacgcaatgtttgatttttaaacgattgcgctaactctaaaaattctaagcgcattcttaccattggattcatggttgttgcatataaatttctagctttttggagcgactcttcttcgtcaatttgatttgttagtatatcatatattaattgataaacacgaaccgattcccaaagcaactcatcttctttatgagtgttaataagaatttctagtatatcaaattgctcatttagtgcagcatactcaaacgcgtcccggacatgctgcagcttctttgccgatgccgcatatacattcataaggggaatgaactcgtcaggcattaagtgttttgcaataaggagcacttcttcaaacgagtactcatcactatttgctagttctttcatacgtgcttcgtttaataaaggattggcccaccctttttggcgcaaaagtgtgccagctttttcttttacttcaagcaatgtttatccctcctcccgaaataaagttccatactagtgctatcctagtactttagaacgaataagacaacaggcatggcaattttcccaatatgctttttgttaaaaaatggtgtagaagggagtatcggtgggtggttgggaaaacgtactaaagccctcttttatgctagttgtgtatgggaattcattataaatgatggtagtgctgtcgttgtgaagcttctaggcaagctcaatattgtgtaaaaaagaggaaataaaatggattagccaaatgaaaaaatggatatacacaacaaaatcccaaccacttagattaccttttcttgtaaggtaaaaagcggtttattcagtactaggcctcacaaaaaaaccttgaaaggcataaaaccaatcaaggtatacagcatctatatctcaatttctttccataactctcgaatacttttcccatctattcgtccatccacaaacaattcatttgatgttttaaaggattgagaatagctatctctaactcttgttaaatagtacccatcttcatttctgctaatccaaaaactttgatttcgatagtagaattgaaactcctctcccatcgctactctttgttttaattcttcataatccatagtatcactcctagattatctattaaacgtaccatcactattccatttaaaaatatgttcatgtggccattcaggatgagtcttagcattaccgtgattagtataatcaacgtctctcacagccctgccgtcaggtccataaaatctcctagtttttatttcaccagtattcttgtctgtgatatctactgatgaatttggtgtacccttagcaggatttggaaccgatgttgtagttgaatgatttgcagtgggtgtaacatcaattgtcttacctttattcgatttcactgtttgcttaggaattctccccgcacccttccccccagtctccaccttcctcaccttcgacaagtcatatactacttctcccactttcgctggcttcactaaaataaacgtcgttgccaaggctttctccccgagcgaagcttctgggtcggcgagcgtgatgaagtcaccgaagaaaaagtcgaccactccagtaacaataggatttgtattcaacctctcctcgttcggagggttgttctcaagatacgtgttgatagctgcgacttcttgatccgtaaacatatatcctggtgtggtgaccacttgcgacgtatccgtttgattcgcttgggtacggagctgggcttggtaccactggtattggatcggaaccagctgtttcagttgccgtgtcaggattgccggcgagacggtcgcgtttgccggcaaagtcgataggcgcgcaaataatgggaaatatgccggggtaacggcatgggttgctcccatcgctggcgctcggcacgcttgtagcgcctgttcattgcttaggatggcactgacagggaaatggttcaagtaataccagttagctgctttcaggctaccgtatagaggggcgtaggcgcctgtatacagaaattctagcggcaagacgtcttggtacagatccccctcacggccttcgatatggcttcggtctagtggggccatttggagcgcttgtgtcacgacattttgatatagctcttccatattggcatcgatctccgcctgcgtttctggggaggcgatcacgccgccactggtccagttggctacttggctgacgacggtcgtcagttcttgcaaggtgctttttgcacttacgagcaccgtgtcgttggcttcgtccaagttgccaagcctttccgccgttacacggacatggtctttgccttgttgggcgtagcgcaagaccggttccattgagaacgggggcagtggcaataggtctgcgatggaagcgcgaatcgactcaatcgctgtcgcatctgcgatcgcatagcgctcgactcggtctaggccgtttttgacatcggcgagaaattcttcccgaatcagggcggagctgctttcaaagttgagcaaattcgagcggatttgctttaattgttcgatgtattggccgatgaaaagctggaacgccgccaatacagggagatggagcgtcgcaaaatggtctttgattgcttcgcccccttcgccttgcagggaatcaaggtggatgatcttctggatgctggcctgcaagcgttcgagctgggcttgatcgtgaagctttcgttccacgatttcgtcaagtgcatcgagtacttcttgtacgtcaagtgtgttcatccgtctgttcctttctctattatccgcggcttgccagcatcttgtccacgactccgtatgtttgaacgagttctttcgtttctgcttgtacatttttcacgacgtccaaatagcgattgaattggtcggcatacccgctttctacttccagcaatgaatggagaaaggccatcgacgacgtatggatcgcaggctcgtggtccgccacggaatagctggcctgttccccggtttcgcttaaagcgctgagcacggagccttcgtcgattttgatttcagccatcggttctctcctcctttcctttcctatttcgccgcttttaatgtttggagcgattgtttttttgtgtcgatcacgatttggcaagaggcaatcgtggtttggagccgcctcgtttcgatttcaatcgcgcgcatcagttgttccgtttcgtcttgtacgttcgtgtaagccagttgcatatggcggcgaatgtcatcgtgcgtcgatttggcttggccgcgccacgcatcatggtccagctctggttcgctcccccattttttatggtcgtgaagagtcgcttgttcggaaacaagcgcttgtttggccgcccgcaatcgctccaattgcgcttctgtctggaaaagttgcgcccgcatttggctaatttcatagtggagcttggctatttcggtttgatcggccatcggccatcctcccccctggtggtttcatccttccgtctaaaaaaaatggctattcattccattttattttaaaacaactgttcgaaatcgtctattcaattttttatagaaaaagcgcttttttatcccgccataattaaatgggagcgttgcgattgaattaaaataacaacgcgcccaaactaggactgcatttctatattccgctctgaactaagaataatctcatcgttttaggacaaagcttccgttcatttttccacataaatttgttagacttaaaaaactcgcacttttttaacgatacatcgttcaggaggttctgtataacagtgaaaatagtagattacttgtttaggttgttaattgtaaccttttgcttgttatcgcttactctttcaacgcctttagcctcaaccttctttgtggcgattttgtttttatattttgtgttcttgttttttaaggaaaaggatcggaaatggcgctatttgaatttggttttaggttttttctttctatttttggtgttgcttttcacttaaaaaaccgctctgtcaaagatataaaaaaacggcctcttcctctttgcaacaggattcagccgtttttaaacgtattttttcttagagtgcttttctttccatcagccgaatgccaattcctgttacggttagtccgataaacaacagcacagatgtcggcaataaaaattcggctaggcttgcgccttggtatgtggctcctttcatcatgtctagcgcatgcctaattgggctcaaatacgagagggcacgcatcgtttcggatcggacaatttctagcggccagaaggcgccaccaatcatagcgaatacggttgcgacaaggggaatgacggcatttagttgctggcttgaacggacaatgccgctaagcagtaagccaatcgccataattgcaaacacgtatgggataagaacaagcgacaatttccagaagcctccataatagtcgtaaccgaaaacaacgttaaacaggacgagtgaaaggaaaatttgcacgtaagcgagcaaaaatgaaaataaaagattgccagcatataaagctgttttggaagctggcgctaaaatgagccggttccaaatcccttcttctttttgcctgagcaaactcatgattgaaaagctcattgtaaaaatagcaaagtagagtgcgaaaccgaatagcgcttgcaacgagcggtcaaaattcgttccttcttgcatcggctccgttttaatagcaaagcttccttcatcgactatatccgttactcctgccttggctaagcgtttgtttgcataataatggttaagttctgcttgtataagtggaacaaatgtcgagccttcataggcggcatgaagcgtatagtcgagttcccctgcctcaatcacgccgtctgcctgctgcttgctcagaagctgcattgcctcttcttcggaaacgatacgcacattccagttgttttcttcccaatccgttgctaagtcctgtaattctggcttgcttaattccgttgaaaacacatgcacgacttgcgcgttgcttccgctcgtgccccctgcaataagcgcaaagatgatcgtgaggccaagcataaataccaattcaactgggttgcggatgacatctcgaaccaattggtaaagaacagctttcacgattccgcacctccttgccgcggaaaaaacagccaagcgattgcaaaacatagacatgaaaatccagaaagcataagaatagctggacgtatctcttcaagagccgccccttgagctgcttgtaaaaaggcagttagcgcacggccatttggcgtccattggcttagctgcgccaataaaggcgacaagtcgctgactggaaaaaagctgccgccgacagacgcaaaaatggtgatgataaaaaacataaattggtttgcgactttttcagagcgaaagcgaaactgaatcgcggtgatgagcaacgcgacgctggcgacagcgatgccaagcatgagcgaaatgagcaataccccaggccaattgccaatttcgattcgaaataaagccaagttgacggcaaagattaacatcaattgaatgagtacaaggaaaacggtcgtcacgcctttgccaactaaatatcctacttgtgagacattggcgagaatgagccgagcgtaaaccgatgttttcttttccatatacgcatacgatgccataaatccggctgtgtagaacacaaacatgacgcccattgcaaacatataatattcaaatgccgatataggctgactgccttggtaaataacgtctccgattccttctaacatacttgattcaagaccggcgtttgccaaagctgtctgtgcataaaattggtcgataaactgtttcataattgcctcgacaatcgctgcttgctgcggctcgcttgtattggcataaaaagtgaacgtgccagtcgattccccgcccccgagaaattgctgttcccatatttgcgcccgggagccttcgccaatatgcagaacgccagcataatccttgtcccttgcttcactgagctcattttcataatgaaacgtgatgctgtccaagtcttctgtgctctcaacggtttcaatcaataattctggaacagacagctgttcagctaagcctaaaacggctgttttttcttgggcaggccaatcatccagctcgtcagaaaaacgctgtaccgcgtccgcaagtgtctcatctgaaacgatagcgacgtcgattttttccggcatgcctgtaaacgcgtctcctagggcaaaaccaagaattagaataagcacgagaggcatgaacaacatcgtgaccagcgcgcctttgtccattaaaagctgttttgcgtcttttcctatataaaacatatatgcctcctaatcccgcaacgaccggccagttaagtgcagaaatacatcttctagcgtcggctgcttgatatggatgccttttacagtagtaccgctgtcttcaaccatatgcaaaagcgttggaaacaaattgttttttgctgaaacgatgcggtagccttcgtctgtctcctttaaggcctgcacatgttcatggctggctagctgttcttttaattccgccgttttcacagcaactgttagctcataagtggattgagggctaataatccgcttgatttcgctttgtgtgccttctgcaatgacagagccacggtcgacaatataaatgcgattgcacaaaaactcgacttcttccatgtaatggcttgtatataaaatagtcagccctttatgttcctggaggtctttaataaaatccagcaaatgccggcgcgagtgtggatcaatgcctaccgttggttcatctaatattaaatactcaggcttgtggatgagggcgacggctaaatttaaacgtcgtttcattccccctgagaacgtccgcacaggttctttttttcgatttgtcaattccatcaaatccaataattcggctacccgctgttttaaagcagctttttcaagtttataaagcttcccgaaaaacaataaattctcttccgccgataattcttgaaacagggcgatttcctgaggcaccacaccaattcggttacgaaatggcttcaactggtttgcgactggcttgccttcaaaccggatctcccctgctgtcggctttgttagtgtcgtcaacatgtcaattaacgtcgatttgcccgctccgtttggaccaagcaggccaacggcttccccttgccgtacatggagatggacattttttactgcttctactgcagcaaagctctttgaaaccccttctagttccagcattcttttccctcccttgtcactattatcatacgcgtgctgcttcgttatatcgattcactgcggtcataaagtgcttatcccctacatgacttaagtcatctttttggagacaaggggcaacaagccgtgcttatgcccatttcggctttttgcacggcttgttaaatatcatgtttgactgcaaaaatggctagctgtgtccggtcacgcacccctagtttgataaacaattggctaatgtaatttttaactgtccctacacttaaataaagttcagcagcgatttccgcattgttgcggccctgccccactaggcgaatgatctctttttcccgctcagctaaaggtggaatctgttctttctcctgcggagctgagtgctgcagaagctttggcatgacctttgccgccacttggccatctaagacgagttcgcctaaaagtgccttttcaatcgtagcaaacaaactttccatatcggcatcttttaatatatagccctttgctccagctttaagtgcctcaatcgcataacgttcatcaataaacgtcgttaacataacgattttcacatttggatcccgttcaatcagccgctttgtcgcttcaatgcctgtcatcacaggcatacgcacatccattagcacaaggtcaatgacatggcggccagctaaatcaacagcctcttgtccattctcagcttcaatcacttgataacgttgacgatgctcgatcatcattttcaaaccttggcggacaatttgttggtcttcagctaaaagaatcgttttcaattgccgtcgtcctttctatcggaaaagcaccttctactataaacatcccgtcttcattgcttgcccgaaaccagccatgcaactgttcaaatcgattgcgcaactgcgtcagcccaaatccttcacgaaccgcttctggctctgcttcattttttaatgtcgctacatacgtccgtttgccgacaactgctaagtggacatcaatctctttggcataagaatgacgcatggcattcgtcaatccttcttggacaaatcggtatagcgccacgttctgttcctctgagagcggcacagacagagctccagcttctgttgtaaacgtgacgcgaacatggccctctgcctctaacttgcgaatgaggcgaataatcatcgctacgccccgctcttcttcactttccagtgctctaactgcactgcgcatttctgcgagcgctgtccgggcggtttgttttgcctctgcgattaccggatcttggaccttcatctctgcgacttgcagctgcatcattagcgctgtaagctgatggccgacggagtcatgaacgtctctggcaatccgtgtacgttcccgctgcttcgcggcatcttcatgttcaagaaaacggcgacgcagttgtttctgctcgtattggagttcatctattttttcttgttgctggcggttttgcctttgccataaggcaaattgccacatcatataaaacaaaataaccgtagtcagcagccagacaaacgtagccgctatacccgttgggctacataaaatcgacgcagccactaaagcgcttggcaaggcgcttgcctgccattgtccactacttgttcgtgcaaatggataaacagccagcaatattggcacgagccaagctgcgtccattccagctaacaatatgtatacgcacgctatggctgtcagcaaactatatagccacatggggcgccgccatagcggttctgaaagcagaccgcctaatatcaatccacttgtgagccaaaacagcgggtcaacaagttgcgtcttgtcactgagcggccaaatgacaattcctgcaaaaataaaggcaacgcgcacccaatacgccacggcgcacacctcctagttaatcgccatttggtaaatgcttgtaatacaaattcgtccctcgtaagccaccataaggattttgggcaaattggggaatcgtccctgcaaacgtatagccacttgttttgtacaatacattcgagggcgcgccttcttccgtatctaggatgagcaacgtccggttatgttccattgctgttttttcggcaacggcaagcaatttccggcctattccttgccgcctcgctttgttagcgaccatgagcttggctatctcggcacggtggcgaccattcgctttgtcgacgaggtgaagttgaatcgttcccattacgttatcatctgctaaggccacccacacatgggtatgctctgagagttgaagcgattgccaatacgcttctgcctcttgtttttccataggggcgataaagccaatcgaagctccgccgtctacagtgtctaccatcagtttagccaactgaccaatatagcgacctacactttctagtttgctaatttcaacactcatcctaccccatccttctctcttcctaccgttattataacgtagctgttgcatttttgcttaaagatctctatttaagcttgacattgataacgattctcaatatgatactttatagatcgaacaagagaggacgtctattaaaatgaaatcccgcaatctcgttacagcctgtatggctaccgcattattacttggcgcttgccaaagcgaaaacgaaaacagttccgatgctggttctgcttccgaaccaaagacggtgactgacggagtaggcaatgaagtcacgattcctaacaagcctgagcgcatcatcggctcttacttagaggaccctcttgttacacttggagtgacacctgttgtccaatggtcggttgccagccgtgaatccactcaagtgtatttagaagaatacctcgaaggaattgatccaattgattcagtgcttcccctcgaagcagtcatggatgctgaaccagatttgatttttgcgccaggggagactagcttgcaaagcggcgattatgaacaatacaattcaattgcacctacttatgtattagaccaggaaacggccgatgattggcgggcggcgttaacagaaatcggcgaagtgctcggtttagaagataaggcagctgaggcgcttgctacttacgacgcccgtgttgctgaagtaaaagaggcattaaatgaaaaaataggcgacagcaaagttgctgccgtttgggtgattggcggcgatttttatgtcgttgcgccagatgtagctagcggtgccgtgctctttgaagacttggagctagaaccggccaatgccatcgcgaatctgcctgaagatgctggcgcccactggaatccgatttcccgtgaggcgttggctgaacttgacgcagactaccttttccttgtagacggcgacccagatacaatcgaatcattgaaatcagaagcgatctggtccggcattccagcagttgaacaaggcaacgtgtttgaagtttcaggtaaaagcagctggctttataacggctaccaagccaatatgcaaacgattgattccgtttatgaacatattatcggtgaataaacgtgaaatggaaaaagactggactctgtttatccaacagagatccagtctttttcggtacttcgctaaccggaaagcgagacggcatgttcttatgggaagacggaaaaaccgccgtccctgagattacctgcctaaccatccgccgtcaacagcaagcaaatggccgtgcacataactagacgcctcagaagccaaatagatagctgcaccggcaaagtcgtctgcactgccccagcgccctgccggaattcgttcgagaatttgacggctgcggacaggatcggcgatcaatgcttcattcatatcggtcgcgacatagccaggtacaatcccatttacattgattccttttgacgaccattcattcgccagtgcttttgttaactgggcgacagctccttttgctgaagcatacgcaggaatgttgattccgccttgaaaagaattcagggaagcgacgttaatgatttttccctgtccatttgcgagcatgtgcttgcccgcttgttggcacaacatccaaaccgcctttaaattcacttgcatcacagcatcccaatcttgttccagaaaatcaacagcaggggaacgccgctgaatgcctgcattgttaatcaatatatcgactttccccattttatcgagcgcttgtggaatgacttgcttcacttcttcaagtttacttaaatcggcttggatcgattcgcaccgcacccctgtttcttcttctagttttgatttaagcgagtggttttcagtacgttgcacgagaacaagatctgcacctgcatgtgctaagcctgttgcaattccttttccaattcccctgcttcctcctgtaatcacggctacttttcctgataaatcaaataagtttttcatgtttccctccgtatatatcctttgactaaacaaaaatacttaatatgaatacgaatagaagcccacaaacggaaataattgtttctaacacggtccaggtggcaaatgtctctttcatggttaaaccgaacgattctttgacaatccagaagcctgtgtcatttacgtgtgaagcaataatgcttcctgctcctgttgccaacaccattagggccacgtttacgtcgcttccttccatgagtggaataacaagccctgccgttgttagggctgcaacagtagcagaaccttgggccaagcgcataagggctgcaatcagccacgccaaaacgagcggggataaggcactgtcaataaagagagacgccacatagtcccctactccgcctacaattagtacttcttttaacgatccgcttatcccaagaattaacaaaatcatcgcaattgcctttacagactgctcagcagattccattaattgagccattgtccgtttctgggaaatgcccattgtatataaagcaagcaacaaggacaaaaacatagtagaagtcggcatgccgataaaagcaacgacatgaaacaaccaatggtctgggaggtttgctgcttcttgcaaaaggctcgtgacagtggcaattcccatcaatagaacaggaaacaaagcggtaagcgcactttttgcaaagccaggcgtatcttcaaggggcatcggtttgctgtcgccaagtgctgccattccgcctttgttcgctttttcaaacgcgtcaggtacaaattttcgtgcatactttgtaaacagggggccagcaatcagcacggtcggaattgatataataaatccatacagcaacaccatcccgatatttgcgccaaactctccagcaataactgtcgggcctgggtgcggcgggagaaaggcatgcgtgacggagagcgctgtcgccattggcaaccctaaatagagaaacgacaaattcacttgctttgaaatttggtagacaatcggaataagaaggacaagcccaacttcaaaaaagagtgcgatcccgagaataaaagcagttaaaacaaccgcccattgaatccgtttttcaccaaaagcgtcaattaacgttgttgaaattcgttgggccccgccgccgtctgcaatcagttttcctaaaattgctccgaacccgaaaatgaggccaacacttgctaatgtgccgcctaggcctctttcaatcgacccaacgatatctgaaagtggaatgcctaacgcaattgcaagtaaaaatgtaacgattgccagtgaaatgaatgtattgactttccacttcataatcaaaagcaatagaaccaaaactccaacagctgtaataagcagtggcataccaattctcccctctgttctacgttatttatctgggtggatgatgacttttatgcttttgtctttatttgatgcagcgtagtcaaatgcagcgcttatttgactcatcgggaaaaaatcggtcaataacaattgggccgcttcttgttccttttccaataaggccaacgcatgtttaaacgtatggcggtaacggtagatcggttggtaaacaatttccctctgcatcatcttcagcaacggaatcgtagactttgctcctccaggaaagccaattccgccgatagtgcctcccctttttagcaagttcactgccatatcaaatgcagcttctgcaccagacgtatcaatgaccatatcaaacccgcctaaacgatcggcttcagccaaaaggccagccctgtctgcttcatggttgacttgaattgtatccattgcgccaatctttttggcgatttctagtcggtacggttcgatgtctgtgacgacaatgttggacgctccgtaccatttggctgcaaggatcatgcacaatcctacaggccccattcccataatgacgatattcgaacctggttgaatcgatgtcttttgggctgtgtacaaccctacagaaagaggttccgcaagagaagctaattcaaacgacaggccttctggcattttatatgtaaatttagctggatggcatatatattccatcaatacgccgtcattaggcgggctggaaagaaacaatacttttgggcaaaggttatagtgacctactcggcacgaagaacattcgccgcacggcaatccaggctcaatgacaacatggtcgcctacgtttaaatctgctacttctgggccgacttttgtaactacgcctgcacattcatgcccaaggacaaatggcggctttgcgaccctctctcctatgcggccatgctcgtaataatggaggtctgacccacaaataccgacggctttcatctgaatcaaaacttcgcctgctcctggctttggcttggtccgctcttccaactcaatcgtttttaaagcttttaacacggatgctctcattatttattcctctccttcttaatgtttcctaccagactatccctaacgggctgcatacccgccatcgactggcaggatgacaccgcttacataatttgctgcatcggatgctaaaaatactgcggctccccctacgtcttctggggttccccagcgccgagcaggaatgcgggcattaatttgcggaagcctctcatttgtttcctctaacaaatccttgttcatttccgttgccatatagcctggagcaatggcattcacttgcacaccatagccagcccattcgtttgaaagcgatttcgtcagctgaccaacggcccctttgcttgctgcataggcagtggcattgaatccgccaaagaatgtaagcatagacgcaaggttgatcatttttccacttccctgctctaccattgtctttccgaaaaattggcatgcatggtacacggcagtatggttgatttccatcactttattaaaatccgttactgggagatcaaagcaagcacgcctatcatgaatgcctgcgctattgacaagaatatctacttttccgtttaatagagaaattgctttttgaaacgcctcttctctgcctgcaaatgtagacaaatcgccataaacactgtgaactttaaaacgtggctttaattcttggacaatatggtcaagttgattcgaaatatcaataagcaccacttctgcgccagcgttccctaaggcggtggctatcccatttcctaatcctcttgctcctccagtaacaaccgctttctttcccgttaaatcaaacatgaatagcccctttcaggatcatttaatcgattagatttccttttaactctgagtcttactgttcaatttaatcgattagattttcttgtaagcgtttttattattgtaaacaatcacctccctaatgtaaacccttacaatttattttttccatccacatgttttccgtttaatcagttcaacaggcaacgtcacctgaagcttccttgaatctgttcggtttttcatcttctcaattaaacgttcggttgctcgttgcccgatttcaaaccggggcatccgcacagtcgttaattggacagagcgcaagttagcgagaaataaatcatcaaatccaatgacagcaagatcgtcagggacgctcaagcctttgtctgaagctgcgtcaattgctccaagtgcgccgatatcgccgatgttaatgagcgccgttggccgtttatcttttggcagttcaagtaagcgcatacattcttgatagcttttttcataattagctaacccagttggcaaccactcctccaatatatgaaaaccggctagctccattgcttttttatatcctagggtacgtgtagcatcaatgggcgagtgttggacccctctcataaaagcaatttttgcatggcctaactcgatcagatggttggccgcctcaaagcctccttggaaattgtcagccattacggtatcaatgtccatttcagggcaacgatgggctaaaacaatggggtacccttcttgtaaaagttgttcgagaaaaggcacatccgtgtttaacgcagttgtgacaatcaatccttcgacagtgccttctcttaattgcgaaacggcttttggcaagcttccctgttcatcatttgtattcataatcgttactgtatacccttctttcttagccgtctcttcacatgctttagccaagtcagggtaaaacgggtttgcaatgtcagcaataattaaactaatcactttgcttcttcttacacgcaatcctcttgcgactgcattgggtacataatttaattcttttatagcacgttcgacccgttctcgtttttctgggctcacatacctcgtattgtttattacataagaaacggttgctgtagaaacattcgcgcgtttcgcaatatctttgatagttggcatcccatcacccctccgctacatgcatcgtttgtctagttatagcaaagagaataaacatctagacttcaaacacgttgcatctatcattctcttttgcagcttggcaacctcaggaaacagcttttcgctgtttccttgatgccatttttcctattcatttggacaatcgaacaagcgtccgttccaaaagcaatgatcgctcctgaagggaatcgatttctacatactcctcttcgctatgaggattgccgccaacagggcccatgccgtcaatcgtagcaacccctaatgccgatgtgaatgaggcatctgatccgccccctgtcgctgtttccgttaacgtgagatcgagagcttgtgcttccttttggatcacgttaaacagatcgaccgtctgctcattccgttccattggcggccttgtgatcccgcctattaactcaatggctgttccctctacggtaggagtctcgcatatgctctgtatttttttctccaaaacagctgcttgttcaagcttagaaatgcggatgtctatgcttgcttcggcatagtcggcaattgtgttgacggatgtcccgccttttattaggccgacattgacatttgttcccgctttttgatcggataacccgtgaagggcaacgattttatgcgcaagctcctcaatcgcgcttctcccattttctggttcaatgcctgcatgggcagcttttccattcactttcatgacataagtaccgccgcctcgccttgctgttacaagggaaccgtctttgcgtgccggttccatgacgaggactgcttttttgccttttgcttcggcttcaatgatctttcttccagaaggcgcgccaatttcctcatcgctcgtcagcaaaatggcgatgttctgtaaggcggaatcatggtttgccgctagcgcagaaacagctgaaagcaatgaaacatggctagctttcatatcgactaccccaggcccataggcacggtttcctttgattgaaaaagggcgtttggctgctgtgcctgttggaaaaaccgtatctaagtggcaaagcaacagaatggttggatcacgtgcttcttgatgggtgatcgtcatgtggttcccataggtgctttgctcatggataacggctgaaaaccctaatgctttgtattgctcataaagaaaagagcctactcggtcgattccctctttgtcataggaaccgctatcgatatttactagtttttcaagcaaatctagcatgtttgctttggaataagtgcccactcgccggattcctcccttatattactaacatcgacgatcagctaatagccaatccgccgtcgtcaaaaacaaaacaagcagtatgacaacgtcaacatctcttgatcaatcgttgcacggccgttcatttccattctttaaaaacgatatggatccattatagcgaaaatagggctcttgctctagcaaatcagcacattgtttgctcgattgacaggataattccaaaaaagaccaatggcactcatcccctagcgccattggtcacgttgtagacaaacgctcgtttacgttggcgtttgcgcaagtcaattgtttcaaagcaaggaaaccgctgttcataaacgcacatccgagtcgatcgcctacactcctcgtctaacaacggtactctgttgcttcgccgcttccatcgcttttactgcaatatcatttcggtaatacaagccgtcacttttaatttctttcacagcttgataagcagccgcctgggcatcggcaatcgaatgcccagtggcagcagtcaacaagacgcgcccgccattggtttgccaaacgttcccttgctttgttgtgcctgcatggaacacaagacctttcgttgcagctgcttcaatgccaacaatggacacgcctttttcataggagccgggataaccgacactcgcaaggacgatgccgacaaccgcttcttgtttccattcaagttctaccttgtctccgtttagcaatttcaccatcacgtcaattaaatcagattttagccgtggcaagaccacttgtgtttctggatcgccgaagcgggcgttaaattcgattacttttggcccttgggcggtcatcatcaagccagcgtataaaatgcctgtaaatggccggccttctttaaccatggcgtccgctgctggctgcaatacttctactacagcgcgttccacgtccgcttgtttgaattgtggaacaggcgaataggctcccattccgcctgtattcgggccttgatcgccatcataggcacgtttatggtcttgggctccgaccattggcacaacggtattgccgctcacaaacgccataagcgatagttcctcgccctcgaggtattcttcgacgacgacttgtgcgcctgcttcgccaaatgcactttcgactagcacatggcggagggcagcgattgcctcctcctctgtcaaagcgacggtgacgcctttgccggcagcaaggccgtcagcttttactacaatcggcgcgccttcttgctttacgtatgctaccgcttcctcgtaatcggaaaacgctttggctttgcccgttggaatgctgtattttgtcatgatctctttcgcaaacgacttcgacccttcaaggagcgccgcactttggcgcgggccgaacacaggcaacccttcctcttcaaaacggtcaacaagccctgccaacagcggcgcttctggcccaacaattgttaagccaatatcgctttggatcgcaaattgcacgagtgcgtcatggtctgattcggcaagccctatgcatgtagcgacctcttccattcctgggtttcctggggctacatagacattgtcgactaggctgctttgtttcgctttccatgcaatcgcatgttcgcgcccgccgccgccaataataagcacattcataggtacctccttaatgtttgaagtggcgtacgcctgtaaagaccatggcgattccatattcatctgctttttcaatcgattcgttgtcacgaacggagccgcctggctgaataatcgcggtaatgcccgcttttgcggctgcttcaactgtatctccatacggaaagaacgcatccgatgcgagggcagcgccttgcgcccgttcacctgcttgttcaattgcaattgctgcggcaccgacacggttcatttggccagcgccaatgccgactgtcatttcgccgttcgtaagcacaattgcgtttgatttcacatgcttgacaactttccagccgagtttcaacgccgtccattcttcttctgtcggttcccgtttcgttggaatgcggatgtccccgtcgtcaaaacctaaatggtcttcttcctgaatgagcaagccgccatggacggaggcaagctttttctccagctcgcctttagtaacagcgacttctagcagacggatgttttttttctgctgcaaaatcgcttttgcctcttcgctaaatgaaggggcgagaatgacttctaaaaagatcgccgccattttttcagcagttgcacggtccacctctcggttcagggctacaatgccgccaaaaattgatttcgggtctgcttcataagcgcgcgtataggcttcgccaacagtggcgccagtgccaacaccgcatgggttcatatgtttgacagctaccgccgcaggttcgctaaattcttttacgatttcaagcgctgcattggcatcattgatattgttgtaagacaattccttgccatgaagttgttttgcttgggcaatggatgacggcgaacttgtcctgctttcataaaaagcagctttttggtgtggattttccccgtaacggagcgtttgtttatgtgtatacgtaaccgtcaagctttcgggattttcctcgccaacggcatcggttaggtagctgccgatcatcgcatcataggccgctgtatggcggaatacttttgcagctagtttttgccgtagggcaagttgctcttctttgcttgcgtcaagggaagcaagcacagcgtcataatcggctggatctaccactactgttacatcggcgtggtttttagcagcggagcggagcatgctcggaccaccgatatcgatgttttcgatcgcgtcagcaaatgacgcgtctgggttggcgattgtttctgcaaatggatacaaattgacgacaacataatcaatcggctcaatgccaagttcttctatttgtttgatatgttcatcgttagtgcgcatcgctaagaggccgccgtggatgttcggatggagtgttttgacacggccatctaaaatttccggaaagcccgttacatctgacacattgacaacagcgatgcccgcttcttctaatgcccgtttggtgccgccgccagtagataggatctccacccctgcttctgccaacccttttacaaatgggattaagcctgttttatttgatacactaacaagtgctcgcttcgtcattgctgttccccctcaacatgctcgtttaaaacttgttttacaaccgccggatagagcgtgtgctcgacggcttggatttttgcagttaacgtctcccgcgtttctcctttggcaattgctacttgctgttgggcaattaccggacctgtatccatgcctgcatcgacatagtggatggttacgcctgtggtgtctgcctttgcctccaatgcttggcctattgcgtccaaaccagggaacgcaggcaaaagcgatggatggatattgatcatctttccctcataggcttcaagcaacgtcggtccaatcaaccgcatataacctgctaacacaataaaatcgatgccttcttttgtaagaagcgtcaagattgcttgttcataagcggctttatcggaaaaagattgtggggaaagatgctccgccttcacccccaaattccgcgctttttcgagtactggagcatgttgcttatcgctgacgacaagcgcgacttctccgccaagttcgcctgtttttgctgctttgatgagcgcttcggcattcgttcccgtcccagaagcaaagaccgcgaccttcatgcaccaatgcccccaatcaccgttccttctgttggcgttacccgcccaataatataggcgtcttccccattagcttcaagagtggcgagcgcttgttggtgtttgtcctcaggtacagcgagcaccatgccaatgcccatgttaaacgtatgaaacaaatcctgttcagataggccgccttgctcttggatcaatgaaaaaatcggcggtatcggccatgaaccgtagtcaatatgaatgcctacgccttttggcagcatgcggggaatgttttcgtaaaagccgcctccggtaatatgggctgcaccagcaagcaacccttgtttgaggcaggcaagcaacggttttacgtaaatttttgtcggcgtcaaaagctcttctccaagcgtcttgcctagtgtggcacattcagtctgcaacgtcaggcctgcatcttgcaacaatactttgcggacaagggaaaagccattgctatgaagaccgcttgatgggagcccaatcagaacatcccctgcttgaatatgttcgcctgtcagcaagtcttttttctcgactgccccgactgaaaaaccggctaaatcgtactcgtcttcctcgtacatgccaggcatctccgccgtctcccccccaataagggcacagcctgctatttcacaaccatcggcgacgcctttgacaatcgcttcaattttttctggcactgcttttccacaagctagataatccaaaaaatagagcggttcagctccttgtacgacaatgtcgttgacacacatggcgactgcatcttggccgattgtgtcatgcttatttgccatgaaagcaatcattaacttcgtgccaacgccgtccgttcctgatacgagtacaggctcttttaaccctaacgtagaaaggtcaaaattgccgccaaatccgcctagaccgccaagtaccccttttcttgctgttcgttccacatgccgtttcattcggtttactgcttcgtaaccagcttcaatatcgacccctgcttctttatatgcgtttgacacgaatgctctcctccgattctttgctatactttcgcgtgcggatgcacggtgtcggcataaatctccgttgggtattcgcctgtaaagcaggcaaggcattgcccgcaattatgcatcgcctcagaacggccaatccctgcttttaagccttcagtcgacaaaaaagcaagtgaatcagcccccatgatttcccgcatttcttcgattgagtggttggaagcaattaattcttccgtcgtcgacgtatcaattccgtaaaagcacggatgtttaatcggtggcgatgaaatgcggacatggacttcagctgcccctgcatcacgaagcatatggacaatgcggcggctagtcgttccccgtacaatcgaatcgtcaatcataacaactcgtttgccttcgactacgccacgcacaggggaaagcttcatctttaccccttgttcccgtaattcttgtgaaggttgaataaaggtgcgcccgacatagcgatttttaatcatgcccaactcataaggaatgccagactgctcagcatagccaattgctgcggaaatgctggaatcaggcacgcctgtcaccacatccgcttccactggcgcttcaatcgcaagctgttttcctaaattttttctcgctgtatgaatattgatggtatccacgtttgaatctggccgcgcaaaataaacgtattccatgctgcaaatcgcccggttccctggagaaacaaagcgttcgctgcgcaagcctgtatcgtcaataatgagcagttcacctggcattacttcacgctcataggtggcgccaatgatgtcgaacgcacatgtctctgaagcaacgacatacgcatcgcctaaacgtccgatggaaagaggacgcaacccatttggatcaagggcgaccatcagttggcgctcattcatgacagcaaatgcataggcgccttttaaggaagacagcccatttttcaattgttcttctaacgtatagtagccgctgcgtttaatgagatgggcgagcacttccgtatccgatgtggactggaagatcgacccttgtgcttcaagctggtgttttaagtgattggcgttgacaagattgccattgtgcgcaatcgcaagaccgcctttttgcgaattgaaatacaacggctggacattggcatagccgcctccaccggccgtcgcataacggacgtggccaatcgcgcccttcccttgaagattacgcaagacatcttgattaaacacatcattgactaggccgagccctttatgggcagagagcttgtttccgtcggacacgacaatgcctgcgccttcctggccgcggtgctggaggctgtgcaacccataatacgtaatttgcgcagcttctttatggccccaaacggcaaatacgccacattcttcgttcaagcctttgatttcagtaaacatggaatagcccctttccaggctttcactaattcatcttggcaaaggtcaatgacagcatttccattttcgttacgaatcgtcaattttctactttccgtaacagccccgacgacaaccgcatcaaggaccgtattttcaaatcgttgttgatcgccaggcttcacagtgacaataaaacgtgattggctttcggcaaacagttcggctgcgcttagggatagactgacttcagcgccaaacgggcattccatcattttttctgctaaggaaacggcaagcccgccttcggcaacatcatgggcagactggacgagcccttgtttgattgcgctcaacaattgctgttggcgggctttctctacagccaaatcaatttccggcgctttccctgacagttcgccaactagcattttttgcagctcgctgccgccaaactctgcttttgtttcaccgattacataaatcaagtcacctgcatttttaaacgactgcgtcgtaatatgagcaacgtcttcaaccaagccaaccatgccgatgacaggagttggataaacagcaccgccagaccgttcattataaagcgacacgttgccgccaatgacaggcgtccctagctcccggcatgcttcgcttaagccatcggtcgatttttctagctgccagaaaatttctggtttttccggattgccgtaattcaagcagtctgttacgccaagtggcttcgctcctgaacaaacaagattccgcgcggcttccgcaatcgcaattttgccgcccatttctggatctacatacaaatagcgggaattgcaatcggttgtcattgctaatgctttattcgtaccgcggatgcggatcaccgcagcgtctgagccaggctcgacaacggtattcgtttgcaccatataatcatattgctcatacacccattctttgctggcaatcgttggctgagccaaaagcttcagcagcgtttcattcgcttctgtgatttcaggaatataaggggcctgttgttgaaaagcatcaaaataggcaggcacttttgacggcttatggtaaacaggggcatcttctgccagggcatcaacgggcacatcggccacgatttcgcctttatgggttaagcggagccggcgatcatctgtgacaacaccgacttccacagcatgcaggttccaccgttcaaaaatcgctttaatttcgtgttctcgccctttttcaacaacgagcaacatccgttcttgtgattctgacaacatcatttcatacggcgtcatccctgcttcacgctgtggcactaggtccaagttcatttcgatccctgaccctgctttgctcgccatttcggatgaagaagatacgaggccagcggcacccatatcttggatgccaataagcgcatccgattgaaccgcttctaggcaagcttccaacaacagcttttccataaacgggtcgccgacttggacagctggccgtttggcatcggaggcttcgcttaactcttcagaggcaaaagttgcgccatgaatgccatcacgacctgtgcttgcgccgacatacataacggtattgccgacaccttttgcttggcctttttgaatgtctttatggtcgatcaaaccgacgcacattgcgttgaccagggggttcgcttcgtagcacggatcaaattgcacttctccgccgaccgtcggtacgccgacacaattgccgtacccagcaatccccgccacaacttcttcaaacaagtacttcactttttttgattcgagttcgccaaagcggagcgagtttaacaatgcgacaggacgggcacccatcgaaaaaacatcgcgcaaaatgccgccgacgccagtcgcagcgccttggtacggctcaatggcagacgggtggttatggctttcaattttaaacacaaccgcctgttcgtctttaatgtcgataatgcctgccccttcacctgggccttggagcacgttctcgccgtcagtcggaaactttttcaacagtacttttgaatttttatagctgcaatgctcagaccacatgacggaaaacaagcctgtttctgtgaaattcaaaggcctgccgacgattttttcagccagtgcaaattcatcatccgtcaagcccatttctcgatataatcgctcggctttaatcgtttcagcgcttggctcaagaagctgtgacatgagattccctccagttgcgtaagatcgatgtaaaaacagccaatccttgatcgtttccgagcaatgtttccgttgcccgttctgggtgcggcatcatgccaagcacgttgccccgttcattggtaatgccagcaatgtcgcctttggagccattgacatgctcattgtaacgaaagacaatttgcttgttttcacgaagctttgctagcgtttcgtcatcacattcatagttgccttcgccatgagcgacaggaatgcgaatcgtttgcccttgttcatagccagaagaaaacatcgtttcgttgttttcgacaaccaattcaactgtacggcacacaaattttaaatcaatattgcgcttcattgctccaggaagcaaaccggcttcaagaagcacttggaatccattgcaaacgccgagtactggcttgcctgcctcagccgcttggatgactgctggcataattggcgcaaagcgggcaatggctccagaacgcaagtaatcgccatgggaaaagccacctggaagaagcacggcatcaaaaccgtctaaagacgtttccgtatggaagacatattcgacttcctcgccaagtccgtctttaatggcatggtacatgtctgcatcgcaattagagcctggaaacacgatgaccgcaaacttcatgatgggacaacctcctccacttcaaagcggtagtcttcaataacggtattggcaagcaatttctcacacatctctttgacgcgctcttcaagcttttcagtagattcaagctgcaattccatatacttgccgatgcggacatctgtaacttcctggtaatccatcgcgtggagcgcacttttgacagcgcctccttggggatctaacacactttctctcaaggtgacatagactttcactttatacatggtaaagccctcctagccgggataaaatttcttgatagccttcttgtaagtttcctagatttctgcgaaaaagatctttatcaaaacgttcctttgtgtctttatcccatagccggcacgtatctggcgatatttcatcggcaaggagcagctcccctgcttgcgtgcggccaaactcaagcttaaagtcaattaattgcacaccgaccgtagcaaacaactcgattaactcgttattcacagcagcggccatttgttttaattgcgctacttcctctgccgcagcgacgtctaaaatggcgatgtggtcctcggtcaccaatgggtcaccgagggcatcgtccttataataaaactccacaagaggctttttcagcgcaattccttcttcaatgccaagtcgtttagccatgctgccagcgacaacattgcggacgactacttcaagaggaataatgtctacttgtttgaccagttgttctgtgtcagataatctccgtataaagtgcgacggaatcccctttttcgcaagcgtggcaaagatgagagaagaaatttcattattgagccgtgctttgcctgcaagcgtctctttcttttccccgttgaaagctgtggcgtcatctttatattcgacccacagttctccttcttcgctgctgcggaaaatccgtttggctttgccttcgtaaagcaattcccctttaaccattgcttgctcagccccttatggatattagtcgtttaaaccaagacgtgtaaaaattgtatcgacatgcttcatatggtgttcatagttaaagcactcatttaattcctctggcgacagcacattcgtaatgcgtggctctccttccaccagttcacggaattgaacgccttcctcccacgcttgtgtcgctttcggctggacaaggtcataggcttcttcacggaccatgcctttgtcgattaagctaaggagcacacgctgtgaataaatgagcccgtaagtgcgtgtcatattacgcttcatgttttcagggaaaaccgttaaatgtttaacaatgttgccgaaccgattcagcatgtaattgagcacaattgttgcatctggcaaaatgacacgctcggccgatgaatgggaaatatcgcgttcatgccacaagacaacattgtcataagccgtgttcatgtacccacgcatcaaccgggcaaggcctgtcatgttttcagagccaattgggttgcgtttatgtggcattgccgaggagcccttttgcccttttgcgaaatattcctcgacttcgcgcagctcgcttttttgcaggccgcgaatttcgacggcaaatttctcaatcgatgtcgcgattaacgccaagcttgccatgtattcggcgtggcggtcacgttggagcgtttgcgtggaaatcggcgctgggtttaagccaagcttttcgcacacaatttgctcgacgcgtgggtcaatattggcatatgtgccaactgcccctgaaagcttgccaaagcggacgccttcagccgcatggtggaagcgttcaatgtttcgtttcatttcttcgtaccaaagggcgagctttaagccaaatgtcgttggttctgcgtggacgccgtgtgtgcgccccatcatgatcgtatatttatgttcttgcgcttttgtttttataatgtctaaaaagcggtttaagtcttctgccagaatcgcgtttgcttgttttagcaaatacgacagcgctgtatcaacgacgtctgttgacgttaagccgtaatgaacccatttccgctcttcgccaagcgtttctgatacagcccgcgtgaaggcgaccacgtcatggcgcgtttcttcttcaatttccaaaatacgctctacacgaaagcttgcgttctcgcgaattttcgccacgtcttctttcggaatttcgcctagctccgcccaagcctcacaagcgacaatttctacttcaagccatgcattatagcggttttcatctgtccaaatagcacccatttctgggcgtgtgtaccgttcaatcattcgttgtttcctccaacaattaatgtaaagtcgtttgtagccacaattcatccagtaagcgtaggcagtgatcggcatcgtttccaagcgccgttacgtgccccattttccgctttggtttagcatctttctttccatacaggtgcaacgaaacggagccgagacggtcaaggcggccaagcaatggggcaacatcgtctccaaggatgttttccattgccgcggcagccaacaattcagtcgatccgagtggcagtccgcacacagcgcggatatgttgctcaaactgggaagtgcggcacgcttctattgtataatgccctgaattatggggtctaggggcgagttcgtttacaagcaacgacccatctttgttgacaaacatttctaccgctaacagcccgactgcctgcaaaccattcactattttgacagccaactcaagcgcttgttcttctgtttcgctttgaatgcgggccggaacgatcgtacgatggagaatgttgtctttatgttcattttccgctacaggaaatgtcttcacttcgccattgcgcgatttagcgacaataaccgagatttcccgttcgaaaggaatcattgcttcgagcacaagctcccctgaggcaagaagcgtttttacggctgcttctaattccgtttttgtgtgtacaaccgcttggcctttgccatcgtagccgccgcggcaagttttcaaaactgctggcaagcctacttccttgagtgcttcttcgatatcggcttcctcataaatcggggaaaatggggcgacgggcacccctaaagcagagatcgcttgcttttccttaagacgatgctgtgttgtcccaagcactttaaacccttgggggaagtcgcttaactctgtgatttttttagctgctttttcatctatgttttcaaactcatatgtgatgacatcacttacattggcaaggtgtttgcacgcttctacatcatcataggcggccgtaaacacatggtccgcgatttgggcacacggggcgtcaggagtcgggtcaagcacggcaatccggtaacccatttgcctagccgacaacgccatcatccggcccagttggccgccgccaataatgccgatcgtgctccctggcttcacttcgttcatacgagttcaccactgctttctagaacggtctttttaatgcgttcacggcgcgttgccaatcgttgttgcaagaccttgtccgttgttgcaatcatttgcgcagccaaaagcgctgcattggttgcacctgctttgccaattgccacagtagccacaggtactcctcctggcatttgcacaatcgacaacaaggagtccaacccttttaaggcacgtgattcaacaggaacgccaatgactggaagaagcgtctttgccgcgaccattcctggcaaatgggccgctccccctgcccctgcaataatgacacgaagcccccgctcttccgcttgttccgcgtattcaaacatataatcaggagtacggtgggcggacacgacttttttttcataaggaacgccaagttcgtctaaaatctcactggcatggcgcatcgtttcccaatcagaagtactgcccataatgatgccgacaatcggctgtttcatgtcacatcccccactcttgtcttctttgcaaacagaaaaagcatagaaccgctttctttcctgacactccatgagagaaagttcgcaaattctatgccgaaaaggctaatatgcgcgtaatgacttcccctcatagtccggcaatttacggttgccgggtagaaacgttcgagccatattcccgagtatatatgaggtgttttcgtttttaacttgctttttcccttttagtttacgcatcctcctcgtaagtgtcaacaaatagtcgaacattttatcgaaagtattttacattgttcgtttttatcttttttaggcactgctgaaacaaatgcccaattgctgcatagcataatgtacattgattgaatgatataacttcatgattgtgattgtgatgaggaggacagacaatgagcgcttttgaacaacgaaccaaacgcctctttctgtttattgttttcggcattgcctggggatgcgccgcactcgcgcttgctgtcccgcaaacaccggttttataccttgctatttttgccgcagcgagcccgctatttgctgcttatacgttgcatttatcaaactataccgactcattctttacccatgtatttctatctgggaaaccaaacgtctggtggattgttgccgttttcgtcccgctgttcttttgttttgtcctattgtcttcttttatgcttatcgctcctgcgctgatgacgaatccgtttatttggctgctcgtttttttagctgccctattgcaagagatcggttggcgtggtttttttcaaaaagagtttactagattgcctttttggcaatcatcgctcattgtcggcgccattatcgcctgttggcatatccccgttattcttgtatttttccaaggcagcgattggcatgttttgcttttggctgcatactttttgctagcaagcgcgcccctttcttttttgacagcgacaagcaaatcgtcaatagcagctgcgcttatgcaaactgggttatttatggtgttttggcttagtgttccttacctgcaagccgtgattgtcgtttttgctttgcttctcatgcttaatggccttgtgatgctcgccaatgccgtctatccatcgttataccgcaatgcgtttgtcgttaagtaacattggcttttctcaccccccttgctatactagatgaatcttaaaaggggggaagagacgtgtttacgtttgaaatcgacgatcatgtttacttaaaagtacttgaccttcaagatgcgccggcgatttttgcactaattcaaaactcaaaagcacacttgcgtccatggatgccgtgggccgagtcaacgaacaaactagaagacacggaagcgttcatccgctctagtatgcaggactttggcgctaacagcggcttgcacgctggcatatggcatagaggccaagcagcaggcgtcatcggttttcaccagtttgactggaaaaataaatcggcaacgatcggctattggctcggtgaggcgttttgtggcaagggactcatgacaaaagctgcccacgctctattaaaactagcctttgactactatcatttagaacgagtggagcttcgggcggcgacagaaaacaaagcgagccaagccgtcgccgaacgccttggttttacaaaagaaggggttatccgccatgctgaaatcgttggagattcgcaccacgaccatgtcgtttatggcttgttaaaaaaggaatggcaagcaaatgcggagtaatcggacaacgaaaccatcgccagggattccatactagctagattcctacattatacacgcggatgcgcatccctaaaaaccacgttgtatcctttattcgtggtttttagggaagatgaaccttatgtcatactgtttacaagattccatagttcctcttctgttatgtttccagctactcctggcttatcgcgcaaatacgtgacgatctccctttgcggcaatcctacatagacatacagccctttcacgatcatccttaagtattcaaaggacggggcatggaacggtacttcttttttccactttgccgtaaaagtgaaaatagggaacccttcctcttcccctgcataaagcactgtgccataccaagaaggaagtacggctttcctccctctttgcttcaaatcgtcgatgtcaattgaaaaagcgagcccgttattttcctgtttaacgacatcttcaaattgctccttcgttattaaatatttccggctgtacgtataagcccccgctaaaggagtcaagccaataaaagcaacgcccttcttttgccaacgggttgagttttgagcaaaataaagcgggaaaggcaatcgatgcgctgtttcctttattgggtgggcaggatctgaacaaccaacttcttcgatctccgccccctctggctggccgcctcttatataacaaagaaaccgctccctgttcatattcgatccgtagctggcataccagacatacgtagcgttatccattcgattctcccctcctatttttaaccttaacctctcctttcattgttataaaatcagccttattctattccaactctctctatcgcttgacggccttcagccgtactaatcctttatcaaccgatgtttcgatataaccaatgatctgatcaaacgtaaatacatttagtgtctcgtttatgacgtcttcctcgtactccatatcattgattacatcaggaagaaatgattccacatcttgcgattttacttcttgcaactcacaaatggtcggtagggaccgaagcatggggttcaattcatttgcacaaccataatgttctaataactttgcgttcaataagcgaaaatcatgataatacaagttagacagttcgttatcggcctccaaccggtttttcaaccatggcaaataaaaaccttttaaccataaatcatcagcgatcaaatggacgaaatagcctaatatatagtcactatctgtttgcgaccgatatttgtctagaaatccgttatagtcaatcctccttgaatagtcttgcaacgcccctttaaagaaatgggacaactctttcggcgacacagcatccggagcaatgccgccaagcaaaaacgcctgcttatcttcaacagggaaatactccgctattcgattagcgatcattaggtgcatgattcgtgaacccaaattcctcatcctcccatcctaaccatcttattaaatgcaacagccaaccatacgataaaggcacctcggttctgttgtctacaccgagacacaacactgaccattttttgcttatgcataaaaagagtggtgcaaaaccactctttatatactcccgcttaaatgttcatgtattaatttccattcgccatcatagacggtgaaaacattcgttgccctgccactgcctgaaacaaacttgccattatggtatccttcataccggtacgtgtaaatgcatgttgcgacattctcatcagcagctaaccagtgaacatttgtcgcagagtaaacttcctctttaatgatttgccacgcgtgttggaagtagtttccgatgtcctccagagacgtacatgttttatctgtaaaccagtacaccgcctcaggatgcagaattttttttacttcattaaaatcatgggtattcgttgcgttaatgtatgcctctaatgctttttgatatgtcatggtgtcctcctaaatcatcaatgctttttccgccttcaaagcttataaacgggtaaagcgggtatcagcaatttcccaactaaacgtacgagccgttacgcaaaatcattgccatctgttcgaatgccttcaaaaacaatgcgctgccgcacatactcaggctctgctttgctgtttttctgggcaaaaacgggcttctcgatccgccttactggccggtagccttcccgctccatccgcgccaagcaatcgctaatcgtttcattggccccgacttcaaaagtttgttttttcggtttcactttttcctcctgacatgaaagctagtttccttagagcgattttaccacaagccacccttttcgcctcatctatatgagttaaaaaacattgaacagcccattcccgattcgtaccgagaaaaggccgtaaaataggatcattttttataagtctccaagctatctaaataagattgtaattcctgaatgtgagtagaagtccttgaaataatgcgtagctgttgattaagttgaagaagatacggtctaagcatttcagagaattcgagttctaccattcctgtgcccttgtcataagttgcactggagagccacgacaatacagttcgtttattccctttatttaacgtcacctttttactaattagaccctcaatggtattttccactgccttgtaaaaatttttagaatctactccaattaatttcgccagatcttctatttttattttttgccgtcgaaaactagtgtctttttcgttgataaacgatgctaatacccaaataatttttttctcttgtagtgttaaatcttgaggcatttctattatattcgcttttttaacagtttcctccatggataatattaaaagttgctcatccatatttccacctctcttgctattaattctaatatagtgttgagtttatatgccactcctataaaagggacatttagcaaattgagagagaaaggccagtactatcaatactttaggcaccataaaaaaatttaaattaaaatatccctttggtaggagtaatatttaaatcgataacaatttttagctacttctttttgaaattccaattgtagatggcttagaactaagcggaacgggttcctaatcaattaaaaagagacgactttcagtccgaagtcctctctattgctctatcctatatttcaattgtatttatatcagttccgtatatattcaccaagcagtgctccttgtttctacagtctgaaaccgcccatttcgggcggcttgcctacataccgatcgtacgattgtggtcttgtttgcggtttgctcttcttttccgccattctgggaaaattaacgcaataagcgttaaggcaaatagcgataccgcgagtgggctttgcaggaaaatcatgaacgatccatctgaaatcgttaatgattggcgcagcatctgttccatcatccctccaagaataaaagcaaggatgaaaggagctgccgggaaagcaaagatcctcattaaatagccgagtattccaaataaaacgagtaaataaaggtcaaatgtgctgaagctgaccgcgtatacgccgaccatactaaatacgataacaagtgaaataagcaaaggccgtgggaccgctaatatttttacaaagtaaggaataagaggcaagtttaaaattaataagaacacattgccgatatacatactggcgataacgccccaaaacacagttgggttttcagtcattaacaatgggccaggttggacgcctagtacgagaaacgctccaagcatgacagctgttgtgcctgaaccaggtatgccgaggctgagcaacggcacaaatgcgccgcttgttgccgcattgtttgctgtttcaggagcagcaagtcctttaatcgagcctttgccgaattcttctggttttttagcaagccttttttcagaaatgtaggcgataaacgatgaaatcgttgcgcctgcccctggcaaaataccaagaagaaagccaaggagagactgccttgtcatcggccctttcatttctttaaaatcggatttgcttaattttaagctgccgatgtttttaaacccactcatcgattctttccggtttaaaataagaaagcacacttcagctatggcgaagacacctagcgcaataatgagaaaatcgataccatcaagcaaattgacgctcccaaacgtaaaacgggttgtccctgtctgtgaatcaattccgattgtcactactataaacccaagcactgctgatgttagcgctttcaatgttgacccgtcgcttaaacttgcgatagcagtcaaaccgagaagcataagtgcaaaatattctggcgggccaaagtaaatcgcaacgcttgccaacattggcgcaaacagcatcaacaacacaacgctgactgtaccgccaacaaacgaacaaatcgccgatatcgcaagggctttccccgccttcccctgctttgccatcgggtaaccgtcaaacgcagcggcaacggttccggcgacacctggagcattcaacaaaatcgacgacgttgagccaccatacatcgacccataatagacgccggccatcatcacaagtgcaatcgtcggattcatgccgtacgtaatcggtatcataatcgcaattgcgctaattggcccgagtccggggatcatcccaatgatcgtgccaagaagcacgccaataaaaacaaaaagaattccttcccagctgaatgcaacttgaaagccttgcaacagcccttcaaatgagcccatattctccctccttaaaacggcaaaatgccagctggcagccgaatcgctaacccgtaattaaacaaccaataaacgccgattgaaaagacaatcgatgtcagcgcattaacaagccacttttgataccctaaaagtcgtgaacatacaaaaatgaataacgtggtcatgatgacaaaaccgattacttctaaaaacgtaataaaggctaaaataagccccatgaccgcaagtagcatccacagttctgttttaggaatcgtccgcttttgcttttgctcttctgtgtcagtgtcttttgcaaagaaaaagcaaacccctagaatgagcaaacttgctccgagcaatttcggcactaagtctgaatctacagggacaaacgcatattctggcaattggaacgccatcactaaataaacaactgcaataccaatcaacacaatcgaaatccctcgattgactgtgagtctcatgttatccctcctttagtcgcggcgaaagcctagttcatctaaaaccgcttccaaatcttctgcttgttcttccaaaaatgcagcgaacgactcggaatccatgtacatttcatcccatccatacgcctcgcgcacttctgcaaatgattccgactcagaagcttgtttaaagatcgactcataataagctagctgttcattggtcatatctggcggcccaaaaatgccgcgccatacgacaaattctgcatctatgccctgttcttttcccgttggcaacgttgacaaaaactcgccttccaaccgttcaggggctgtgatgccaagaattttcattttgccggcacgagcctgttcagcagcttctgacacacctgttgacacaacatcaacgctgccatttaaaacagaagtcattgccccgccttcctgatcagacacgtaacgaattttcgtaatatctacaccagctgcatcggcaaataagacaaactgcatatggtccatacttcctggagatgacacgccaatcgtcgttacttggctcggatcttcgcgcatatcggcaaacaattcttccagtgtatcccactttgcatcagctctgacagcgaaggccccgtaatcggcaattaagttggcaatcggcgtaaagtcttcgtagccgtatggagactgcccggccaaggcgacaaaatgcaacggtggcgaggcgataaagatattatgggggtcatttcgcttatggatgtatgcccaagcaaccgccccgccgccgccaggtttgttgacaacgccaaaactatggtcagcaatcttttcttcatcgattgtcttggcaagcattcttgcggttgtgtcccagccgcccccagctgccgccggagcaataaactcaatggaacggtccggctcccattccccttctgcgttaacggatccgctttgaactggcatcgagcagccgctaattagtaaagcaacacccatactcatagtccatatgcttttttttatgaacactctctacttctctcctttcgtattatttttcttatcttactgagttttcacgataatgtaaccgttttcaaaataacgttcattaagtgcatattatttattttgttcataaagttcacgaaaaaagcaagagatgcctcttgcctttctacgttgcccaatactttcgctccggtctgccaacaatgccatattccagctcagcttttgcctcgttagttgaaattaaatactctaaatagcgccgtgacgttgtccgtgaagcgccaaatttccgccctaatgcttcggccgttactccttccgattgttgacggagcaatgtgcgcactctttcaagcgtcaactggtcgattccttttggtaaggcttctggtggcgcatgtttggttttggcgccttggaaaaattgatccgccgcttgctggtcgaccggctgtttatcttggagccacttacgcaagcttttagctttatcgaccgattgttgcaaacgctcaaatgcaattggtttcactaagtaatcgacaacgccattttgcaatgctttatgaaagattgttttttcagtcgccgccgtaatcaagacgatttgcatgtctgggcatgcttggtgcagctcaggcaaaacgtctacgccgaggcgatctggtaagtacacatccagcaacagcacatcaggctggtgcatgtttgcaagtgaaacagcctctgtcgcattttgcgctttggcgacaacgtctacatttttcattttctttaaaaactgttcgtgaatttcagccactcgataatcatcttcggcgatcattattttcatgttgtcaacccctcctgtgcctttggaatatacaaactaatgatcgtccctgtcggcttattcgcctcgacttcaagaaagccacctagttcttttaatgccgcttgtacgagtgagagcccgaaaccgcgatgtccgccttcttttgtagtaaacccttgctcaaaaaggcgttcagcaacatcgggatcaatgccagtgccattgtcggcaatttcaataacaagctccgccccaatatcggtcaaaaacacatcgacttctggtgtttttgtttccataacggcatcaaatgcattatcaattacattgccaataatggtgactagcgaagccgttgcttgtgctggccacataaatgacaccgcgctatctgggttgatggctagtgtaactttcttttcggaagcctttgaaagcttgccaagcaagaccgcctgaatcgtcggatcggcaatttgctcaaaaatgactttttcatgacgcgtatttacgcctgtttcttcatggataaattcaagcgccttgtcgctatagccaagctggagccagccagaaattgcataaagcttattggtaaactcatgtgcttgcgccctgagatcctgggaatactgctgcatttccgacaaagcattaatcagctcgtaaagttcagaacggtcttggaaactggcaactttcccgccgtactccccgttctcgtcaatcgttttataatggacaattagtcgtttatcgcgaaaaatcgcttcgtgtggccctttacggtgctgctcttttaaaactgcagccatttcagattgtgtaagcactgcttcaacgggcttcccgaccgcatcatcttcaatttgcaacaaatctttcgccgactgattgacaagcgtgacgatccctttttggtcggttgcgatcaacccttctttaatcgattggaacaccgcttggcgttctttatagagtctggcaatttggtaaggttcaagcccaaacgtgtcgttgcggatgcttcgagccaatgctgtgcttcctgcaattccgactaaaaaaatcaacagcagccaaattaaaaatacaaccacaccctgtttaaaaatcgattcaatatagtcgatcataaacccgactgatacaacgccaatgacgtcgccttcttcattaaagacaggcgttttgcctcgcactgcagtgccaagggagccatctgccaacgaaatatagctatttccataaacaagcgcctgttcgttgtctccacctaccattggcatgccgattttttcatggtctggatgggttaagcggatgccattctcatcaccaaccacaatatattctgcatctgcccgtttttggatagcagcaatcaactcctgaagctcgtctgtgctcgcccccgtctctaacgcgttttttacgtcaggaatttctgcaacggcttgggcagtcgtcaacgcttgttcaccaataagctggcgcgcctggtctcgttctaaatagacatataccgctgtgacgagcaccataatcaatgtaataagcccgcctacgtatacgataaacttcttttcaagcgaccgctttttcacgttacgcttcccctctcttgttgtctagtataacggtttcaaagaatctggaaaagggggcggtggatgacgttttttctttcattatactggctgacttcctctgagttaacgacatgtccaaaaagtgaacaacacttctacctgtgctataattaatagctgaatgggaagggcaggtttgggcaacttattaacatacttacttccaacgttttcatacgaaagaaggttataccaattagcacgatttatcttgtcttacttttgtttttcattattggtttatcaaacattatccaacgctttctgccgtttatcccattgccattaatccaaatcgcactaggtatgttgtgctccattagtccaactgcaggccttcacattccattagaaccagagttgttttttgtcttgtttattgccccattgctttttaatgatggcaaagtcacgcctcgagatgaattatggaagctgcgccttcctattttgttgctcgccctcggcctcgtgtttgctacggttgtggtgattggtctattcatccattggctgattccgtccataccattgcctgctgcatttgcacttgctgccattctgtcaccgacagacgtcgtggctgtcagttcgattgccaaacgagtccacatgccaaaagggttaatgcgcctccttgaaggcgaaggcttaatgaatgatgcttccggcctagtcgcttttaaatttgctgttgcagctaccgttacaggggtattttcgattagcgaagcatccgtaagcttcttgctgattgcactcggagggcttggattaggtgtgctgttctcttttatgctcatcggcctaaaaatggcgttgcgccgctttggcatggaagatattacaacgcatatgattattcaaattatcacgccttttgtcatctatattggcgccgaggaatttggcgtttcgggaattcttgccgttgtagcagcaggcattgtccacgcgattgaaaaagaaaaagtcgagtcgcgcacgctagagttgcaacgtgtatccgacacaacgtggtcagtcattctcttcattttaaatggccttgtcttcgtgttgcttggcctgcaaatcccagatacaacgcggctcatctttgaggatccgcaaattacaaatatggaagtgatcggctatattctcgccattacggcttctttgcttttgttgcgctacatttggcttgcattgttttggaaaaaaatcaaaccactgctcttctttcaagcagagccagaagaaaagcatcgtgccattgcactcctaacgttttctggcgtacgtggcgccgtcacgctggcaggagcatttaccattccctatatcgtcgccgatggttccccgtttccagagcgtgatttgctactgttccttgccgccggcactattcttgtgacagtattgcttgccagcatcttgctgccgctattggctaaaaaaccagaacttcaagaagccgaccaacagcttagctttacacgcgcgcttgagcagttgacccaagaggcaagggtgattttggctgacaaatcccattctcacaataaacaaacactgcgccgtttacagcgcgaatatgaccgtattgtcatcccgctgcttcatgatgccaataccaatcacaccttgatagcgccaaaccgcaagaaagagctttttctgttgttcaaagcgctgcaacatgagtatgatttgcttgaggcaacacttgaagaccccacgttaacagaagcgatggaaaaacggctacgtgctagagcgcaaaacattggtcaaatcctaagtgtccgctcgccacttgctttcttacgtttcggttcaaaacattttatcgacagaatgttaaacaaagcgaacaaaaatcgcctatccattgaggaaaagaaccgtctctatttgatttacacgcgcctctttgctgacattatcaaaaaactcgacgaacaaatgacggcagaaaatgagtctgttgccaaacgagtcatccatttttacagaattcagcttaaccgccttgatcatgtacacttgaactacgatgaaaagctctataaggaaatgcttggattgcattacgagattatggaagagatgcgccgctctttgcaaacccttttccaaaacaatgacctttctcgtgaaacaacacaaaagctgcgccgttacttaaactatatcgaagccaatgtaaccgaagcgctgcaactacctgacgagaaaaatggccattgaccacggctgtggcaaggaatgaaaaaagacgcgaacccttatctgttcgcgtcttttggtgttttaatgggaagcattgcagacgacactctaaaggaatgactttacacagcttgcccttgctgcaaatagtacatgtgggcatacgtcccgcctgcagccaatagctcttcgtgagtgcctttttctagaatcgtgccccggtcgagcacaatgatctggtccgcatctttgatggtggacaatcgatgggcaatcacaaacgtcgtccggttcgccttcaacgattccaatccgtgctgaatgatcatttccgtttccgtgtcaatgctcgacgtagcttcatccaaaacgagaatggctgggtccgcgactagagcgcgggcaaagctgacaagctgccgctgtccacttgataaagtactgcccttttccgatacttcttcatctaagccattcgtcagtttggcaaacacgtcctctccgccaacaaggcgaacggcttcctcaatttcagcccgtgtcgcgtcaggccgcccataggcgatattttcggcaatggtgcctgagaacaagtatggttcttggagaacaatgcccatatgtgcccgcattgcttggggcgatagtgttttcgtattgacaccatcgatcgaaatcgtcccagtctgcggatcatagaagcggaacagcaagttgataatcgaactttttccagaccctgtatggccgacaagggcaaccgtatcgccaggctttgcgcgaaacgacagacctttcaggacaggctcgccgtctttgtaagaaaaacggacatccgtgaacgctacttcacctttaaaacgcggaatttcactatcatccacgtctcttccttcttcattcattaattcaaatacccgtgtgccagctgcacgggcttgctccaaattagcaagctgattaataatttggttaactggctcaaacagacgattgatataatccacaaacgcatacagcacgccaagtgttaaaaaacctgctgttccgccgctaatccaccaaatcaaccccacaaacaccacatttttgacaacaaacgtcaaattgtgggatgttaatgaattgagtttaagcagttttacttgatacgtataatgctcttcgtttaacttttcaaacgcggcttctgtttttggttcttggcgaaatgcttggataatgctcatgccttggactgcttcgttcattgcagcgttaatttccgcatttttggcgcggattttccggttatagcctgcagcaaatttacggtacactttaaaccaagcatacaaaatcggcaatagcacaagcgccattagcgccaaacgccaatcaaggataaacaaagcaacataaatgccggcaatgtagatgccgcttgagaaaaagttggcgagcacggtcatatacaactcacgaattgcttcggtgtcattcgtaatgcgggcaacaattttcccagcaggctgatggtcaaaaaagcgtacaggtactcgggaaagctggccaaatacatcaacccgcatccgctggataatgcggtgcgctgctttctttaaatagtaactttggccgtagcggaagaaggaagcgacaaacacaatcccaaggtaaagcaacaaccagttgataataagcgggatttccggcgaataaaacgcaagcacttcggaagttgacaacggttccgcttccgctgtataaacgtctccccctgcttcaatcctcagctctccgtcttgaaaagaacgacttccatcaagaggaagtggctcttccgtaaagtaaaacgacgtgccgatttgcataatttgtataggttcgccttggatttggctgctatcgacgtaggcttcccgtgtgtaataggcgccgttatacgagactgcctggctgcctgcttcggtctcataccaaggctcttcaattcctgaaatatggcggtcaatcactgtttttgcaataaaaggccccgtcaactctgctgctacagcgacggctaacataagcaaagcagtcataattgtccacttgcttgttaacgcataacgaacgagccgtttttccgtactcatatattcacctcctcttcaccaagcgattggttcctaacttgctctgcataccagccgccttcttccattaattgcgcatgggtgcccctctctactacttttccgtcttcaaggacaatgatttgatcggcatgttcaaccgcggacatccggtgcgttgtaataatggttgtttggccagcacgttccttttggatgttggcaacgatcttcgcctctgttttagcatcgacagctgacaacgaatcatccaaaattaacagttccggctttgtcacgagcgcacgtgcaatcgaaatccgttgcttttgtccaccagataaagacacgccattctcgccaacaagcgtatcaagcccctcaggcaaaaaagcgaggtcttgggcgaaagccgaagcttcgattgcttcgtttaactgagcctctgtggcaccatcagcagcaaatagaatgttctcacgcactgatttggaaaagagcacatggtcttgcggcacataaccgatcgcaccgcgtatttcttcttgaggcaaatcggcaatcgacacacccgcaaaagaaatgtcaccgcttagtcctggataatacttcattaattgtttcacaagcgtcgacttgccgctccccgtctttccgacaattccaagcgtttcccctttgttgattgtcagggagacgctttccaactgatttccttttgcgcctggatatgaaaagctgactttttcatatcggatcggcaaatggtggccaaggccttcaacaggcgcatccggcgcttgaaccgctttttcaaccgttaacgtatcgttgacacggtcataagaagcaccaccacgttgcataatgttaaccaattcaccaattgcaaacattggccaaattaacatccctaagtacatgttaaatgtaacgatttgtccgagcgtcacttgttggtggaacaccaaataagcaccgtagccaagcccgatcacataacttaagccaacgaccatattgacaacagggtcaaaaaacgactcaacacgcgccacttgcatgtaccgcttgtatacgtcgttgctcttttcggcaaataatttctcgtcacgacgctcgctccgaaaggcccggataacgcgcatgcctgccactgactcaagcacacggttgttcaaatcaccgaacgcctcttgtgcttttgaaaaacgggaatggatcatactccctaaaatcgtgacgactaacgcgatcagcggcaacggcgcaacggccgccagcgtcagacgccaatcaatcaaaagaaccatcgcagcaagcaagatccccataaataagaccgaatccaacaatgtcagaatgccgaatccagcagtcatcgaaatggccttcatgtcattcgttccacgggcaagcaaatcgcctgttttccgcttctcgaaaaacggcggatccatcgcaaacaaatggcgcataaaacgggaacgcaatttccgttccaaaataaaagcgccgccaaacagttgctgcatccaaataaaactaatccaataactagctataatgataacaaccaacagcgctatcaagctaaaagcatacgaataagacaatgcaccgcgctggaacgcgtccaccgcttccccaattaataaagcgggcatcaaatcaacaacgctgactacaagtagcaatacaaccgctgcggtgtaccgttttttttgttctttaaaaaaccaggccaattgcttcaatacacgaaacattttttctcacttctctctattcaaactttgatcattgctttgctatccaccctctagctcccctaaatcaagcaaaagtggaattcggctcatcaacctattcacatgttgttcctcctttttatttccttttattcccaatcattttgcctacaaaaaagacgctgcggcatgccgcaacgtcacttatgtaagcatatacgtgtgcaaaggcgcgctgataggcgcagcctcgttttgaaagacgcaacctaccgatgaaaaggcagctcgccgacgagacaaacgcagtattccgtttttaaccgtgcagtaccaaaaacattacgtgtcacttgtctcatcccctttcaaaaaaagtaaaaagctgtttatagcttacctgatttatctgataaaaagcaagaagtttttgcaaggtggtttgtcattgcgaccggttctttcttaagcgattagaatcatgaatacccctatcccaatctgaagaaatataaaaatcgactcatcaccagattacgtaatggtaaaaatcatgatgtaagaagagaatcaattacttctcgtcacaaaaatgttttataaactgcattaaaaaagtgtctataagttgctgctttaaatcaactgcatccaaaagccgtaaattttctctcatagaattagtactaccgctttaaggatttttttaagttggttatgtgagaccgatcatcaccataatttatgatagataaaaataagtttattgagactaaataataataaaaatattggtagctttgaaaaggagagaagccccctactcctgccaagtacaaaaaagagtatgagtggttgaaagaagtagattcattagcgttagcgaacgcacaacttaatttgaagaaggcatatagagccttcttcaaaggacgcaccaagttcccaaaattcaaaaggaagcgtcataaacaaagctacacaacgaatatcgtaaaagggaatattcaattgttagatggtcatatcaaatcacctaaagtaaaaatgggcaaaatcagacaacattgagaaatcccttcagcatacaaactcaaatcgtgcacgatttcgatgacttcatcagattcttacagagtacgagaaggagattgagagtaaggaaatgaaaaaagtggttggattagattttgcaatgaacgggttatttgtcgatagcgaagggaagaaagccaatcacccacgtttctatcgtcaaatgctggattgattagcaaaagaacaacgcaaactatcatcccctataacaacttgagacagtagcctcaaaagatactatgtttatccgttgagccattaaagctctcccccctagagtcttatttatagttcctagtactgccaattcaaaaatagcctttaaattaaaccattatacgactaaacggaaattattctacttaaaaatagtctatttttaagaaatgcttgacaatttaaaatacgaattttataataagcacagttgataattgatttattattattaacaataaaaattattcaggaggagattctgtggctgttgaacaagtgagaggttttgtgcaaaatgacggaaatttttgtcagttagatttgcaagacaaaaattttaatggccctattatgagaattgaaaccttcaggtgcagtcaaccagaaggagaatacggggtaactggcgctggaactaaggtaaaagatttagccggcattgatcacttaactccagagagtaataggattttccgtcatgtattctcagtaggctacgatccaacaaagctaaaagctacacttgaaatacgcgaaaccttcactgaatccgggaagtgggaaataagaacaagagatcttgatcccgaaagcgcaagttttggaactattttacttgcttacatctcaccggtcgaaaataatgtttatcacctcagatacgaactcctaactaaaccatctgtaacccccatcttagtaagctcaccactaactgcttctataactgaaattgcaaaaggcttgccagacattggatctcctgtagaagaattaggtgaaattgatacccaatttaatggaaacccgttagacgggctaataaattggacaacagagtctcaaaaagcgcaagaactatttaaaaacttttccgctatttttcagaaagccccgttcactcaatggacagaaaatgtgaaagtctacgaacgaatgggcgattttagagataaatgcatccatccaggcacaaatctaactggtccacatagacaattggcttccgaatttgtcatgattcgtgcataccgctcttccctaacaggactcgctccggtttttgatgccgatatggctaaaggggcagaagatttgtgggacagccaagacccactttctattgatacaaagccaggagtgtatactgtgtttctgagcgcttacattttaaatgtgggtattcataaattaggcttggataaagttcacagcgactacggtggagtaccaatgaagcttgctcctggaagtaaattagaaacaggaattaatccaattgtcgatagtaggagagccaaccagacaattgcagagattgcatacgcgctctttttatctcctaccgctcacaaagagaaagtacttttataaaattgggtaatacaggatataagaaggtttatatcctgtattactaagtcaaagaggggattttttgaaacgtaagttcgctcgtttatttgaaaactatatacccatttggggtaataaagactatgtgtggtttctattagtctctatgttttcattggctggagatctggttgcttgggtgatcacaacttgggttttaacaactcaattcgatcatcctgccgtttacttaacggctcttgtcatactcactcaatccgcttatgcgattatgtctccctatatggggcatttagtagacaagtggggaccgtttactagcttaatctctagtactggaattcgcacagttattttaacgtttttatttatatcgctattatatgtcgaggacggcgttagtccgtgggtgattgtaggactgatgactttagaatacatatttgttccattaagcaaacaatcggaattcgtcatgatcaaggttttagtaagagatgaagagcagctaatacctgcaaatgctctacaaggcattcaatttgatgcctcttacattatcgggccattaatcggtggtttatttgtctctacaattggcatttattacggcctcgttcttaacatggcctcctttctttttctcgggattgtcatgctaatcattgcgaaaagaaacaaagattatcgagaccatttcaatgttgaacaagctgataacaaagaagctaagccaaaaacgtttataaattccttaaagacgggaatctcgtttatcgtaaaaacaccccctatgctatccatcttgcttataggatttttgtggaatttatttgtatttggaccgattgaagtcctttaccctattttcaccgttgacgttctcgaaagtaacggatttgtttatggattacttatgtctgtaaactcagtaggctttatattaggcttatttttggcgggcaatatgaaatggaaagttccttttgctatgacgatgggcatattgataggtctacatggcctcctatatttctttattggaatcgtaccgaatatcgtcttcgtatgtgtcattctttttttaggcggtattgtcattgcaccaaccgatattttttctaaaacaatacgccaaaaaatgattccctttcatatgcttgctggtgtcagttcggtgttagcttttttcagctttataagcaaacctatcggcgctttccttgtaggctcattaataaacacttatggaaaccaatactctggttatattatggcgtgccttggactgatcttgttcatagcttgtatggtcatttcattcaggccagttatgaaaaagatataatgacactatttaaaaaacagcttaaaagcgaaagctgttttttttatttcgattgccgtctgatggattgtttttaatgcacacacagccccttcacccaaaacacttctttccacttccatttaaacaaacttttttccttatcaaaagacaaaaagcaactgtattcctcgtttattcttcagaaacgacaaaaattaactagctgcgtattgggaaaatcaaaaattagcagaaagttgttgatttgtgtcatttgctgtactatcctttaaataagcccaaccacaaaaggaggggaaaacattcaacaacctgtagttgcaattgccaataacggtgtattgcagaaagaacaaattacagaacaattgatgaaagacctcgcaaacaaccatccagaactttcatttgaacaagtgttgacaatggtgaaaaaaacgctgccgaatgattacgttcctttaatgaatatttacgccttacacgttaaaaaactccgtcatgtgcaagatgcatttgagtatgcgaatttgtttaggcaagttgacacattaggagaaatgatccagatccatgaaaatgacgatttattacatgaatgggtcaaagtctatcggttcttctatgattttttgccccatttaaaaaccgatgatgttttgatccgtaatatccgaaatttattcggcttagtcgaacatccccaattgcgaatgagattagaaattgctgaactaaattattttgacattcacgggagcatcaataatttaacacccatgatgaaacaatttaaagaacaatttaaaacgatgcctagtggatttttcaaaagtgcacttgcagcacgggtgactttgcttgcaggcaatgctagcttattcggcgatggagactatgaggaagcagaacgttgttatttagccgccacagtaatagaggccattcccgatgtacttctggtcactgcttatcatggccttgggcttgtgtatttaaaagacaacaagcaacaatgcttagatgcacatcaaaaagctcttttttacgcacaacgctctaagttggatcattatcatcagaacttggaatatgacgatatcccgtttgttaaaaatatgctcggcgaaattttcgacattgatcatgtgataccgaaagaacaagcacatcaatatgtggttaggggcgaaactcgaaaagctttagaaatcatttcccaactagagacgcctggaaaaaaagacgcacatttgctgttttacaaagcaaaagcacttaaaagtattcccttgtttttcgaggcgattaaagctttttcgtctgaaggatacacccatatgattggatttgcggaaaaagaaattaaaaaaatcaaatttttttaagaaggagttaatttacatgaaaaaatggttcgtagtatcttcaactcttgtcgttcttttttccttttctcttggatcattccctactgaacaaagttctgaaattaccacacaagctaaaccaggacaactcctttaaaactctgtgccccaaaccttcttcaaggcttggggtttctattcgttttcacaccaaccaaaaccgcttcttctccttaaatcgttcgccgtagtctgtctctccttgcaaggctgcctcttccgtgggaatccgaaccatcagcatggctgcatttaatagactaaacacaatagccgtccaatacgcttgaaacagcaatgggacaaacgcgatttccgccactacaaccatgtaattaggatggcgcaaaaagcggtagggccctttttcaatgactggcgcttctggcaacacgataatttttgtgttccaatatttaccgagggaggaaagcgcccagatgcgtatgatttgggcaatgacgacgatggcaaggggaatcgcgctccaacgcgaaaatgctatattggataccgtcacttcaatcagtagtgaaataaaaaaaccacaatgcagcgcaaccatccatggatagtgggctgtccccgcttccacgcccccttgtgctttcagccaacgttcgtttcgtctcgctatctttacttccacgagacgttggatgatgatcagtgccatcataatataggcccacgtcaatggaggccacctgcccattcaagcactaacatttctgaacaaaatccagggccgagcgccgcaacgaggccgacatcgccgtgcttatgcgtttcttccattgattcctttagcacgtaaaggacagtgggggaagacatattgccgtgctcttttaacactttgcgggaaagcattgtcatttcttctggaaaccctagtgctttttcatacgcttccaacactttttttccgccaggatgggcgataaaagcattgatctccccgatctctttcccttcttggtgaaggagctcctcaacgttcggcttcagccattgggcaactaatgttggaatatgccttgaaaagataacatttaagccattgtcccggacatcccagcccatgacatcttctgagtcaggcatcagtaccgattgggtcgcacggattactgggcggtaggcttgggcggcgtctgcgagcagtggcgaggcatgcccagcgacaagggcacatgcgacaccatcagcaaaaagggacgtgccgattaaattgcttttcgattggtcttctttttggaaagtcagtccacatagctcggcacaaacgactaaaacggctgtttccgggtgggcgaggcaatagtcgtaagcacggcttaagcccgcagctcctcccgcgcagccaagtccccaaataggcaaccgttttgtttcggggcgaaaaggcagtttgttcatgatgcgagcgtctatcgatggcgttgccatgcctgacgaggacacaaaaataatcgcatcgatttcttcgggagcgattgttcttgataaaaaatggccatttgccaagcagctttttactgcttctacactatagtctgttgctttttcaatgaagagatcgttccgctctcctagacggtggcttgtttgaaaccattccaatggcacggaaaaatgacgcttttcaatttctccattggcaaaaacgtttagtaaccgttcaatgtcagaaaaactttcagcgaataattcccgggcaaattccactgtctgttcctgtttgattggatggggtggatcatatgtactaactgataaaatcgtaggcacgatcgctcacctctacgttagaatgcctatagcatgcccgatcctttcccagtgcatgcatcccttctatggaggaaatctaaacgtaagaaaaaaagattttatttgtgtattgacattaacgttacgtaaacctttattgttaacgcaagggggagttgaaatggaatatacggtcaaaaaactggctcaattagcaggcgtcagtgcacggacgcttcgttattatgatgaaattggtttgctgaagccagaacgggtcaattcgtcaggttatcggatatatgggccaaaacaagtcgacctgttgcagcaaattttattttaccgtgagcttgatgtagaccttgaaacgattatgcagctcgtgaccgacgattcctttgatcctgtcatggcgctctatgagcaccgcgcccacctcctaaataaacgcgcccgtcttgaccgcattatcgacacggttgagcgaacgattgcctcaaagaaaggagcagaaacgatgagtgacaaagacaaatttgacgctttgaaagaaaagcgaattgcagacaatgaaaaagcgtatggagaagaaatacgccaaaaatacggcgataagaaggttgatgagtctaatgcaaaattacgtggcttctctaaagagcaatatgaagccatgcaagcgaaagagcaggaggtttttgccttgttaaaagaagcactggcaacgaacgatcctacttctgaagccgcccgaaaactggcccaggcccataaagaatggctccagttctcgtggacgtcttactcgaaagaagcacatgctggcgttgcacagatgtatgtcgacgatgagcgctttgctgcttactataacaaagcagtacctggtggcgccgtcttcttgcgcgatgcgatattggcttaccttcattaatgtgacgagaagtgtgtggaataacccagttgaagaaactgggttatttctagtaagcttgctcttccaagctgctcgccattattcataaaccagccttttttcccatacattgaactaatgctggattccatatgaaaggaaaagaggcgttttgatgtatcggccccattcgcaagcgtcaactgagcttttgactaaacggttattcctgaggctgccactgcctggcgacgggtttgctttgtatcaagcgctccaggcttccagaaaagaattggtgccatggattccatgggtggagagaatgtcatcgccagagcaagctgaacaaggtgtacagcaagcacatgttgattttttgcaaaaaaaagcgtttcatttccacttatttgagcagcgttccggcacttttgtcggctcttgcgggctccatcacattaactgggacgtcccgcgtatggaaatgggctattggatcgatagccgatttgctggaaaaggctatatgactgaagcggctaaagcgcttatgtcctatgctttctacacacactatactcaccgcctggaaattcgctgtgatcgaagcaacaacaaaagccgagcgattcctgagaagctcggctttatgcttgaagcgacattgctagaaaacgaacggagcccacatacaggagaactgatggatacgtgcatttatacagcttttcatccgtctgtctcccggccacctgagtctatttcggaaaagcaaaatagcgctttgcattatagtaactgatgtcctctaccactttgccgagccatttttcgtcagctggccattcgccccgctcaacccattcaccaatgcgattgcacagaatgcggcgaaaatattcgtggcgcgtgtatgaaaggaagctgcgggaatctgtaagcataccgacaaacaagcttaacaaaccgttgtttgccaagtccgtcatttgtttttccatgccatctttcgtatcgttaaaccaccagcctgaaccgaactggattttgccaggtatgccgcctccttggaagttgccaatcgtagtcgcgaccacctcgttataaatcgggtttaatgtatacaaaatcgtctttggcagttcattcgtccgctctagctcgtttaaaaaacggtttaatgattcagcaaagcggtcatcagccatagaatcaaaacctgagtctggtccaacttgctcaaccatccgcgaattgttgtttcgcaatgcccctagatgaaattgcatagtccagccgagtttgttgtacaaccgtgctaaaaacaacaatacgtatgtttggtatttttcttcctcttgcggcgtaagcgtttcttggtttagcgctttttgaaacgccgcttctgcttctttttcggtcgtgtctacaaacgggagtgtgcgaagcccgtggtcagaaagaacgcagccttcctcggcaaagaatgtcgcccgtttttcaagcgcctccaataaagagcggagcgatgaaatgtccacttctgccgcagcccctaacgtttctaaatacgggacaaagctaggcgctgaagcaaccaatgctttgtctgggcgaaaggcagggtacaccgctgcttggcacgctccctcttttctaatttgctgatgggcttctaaatggtcgctcggatcgtctgttgtgcaaatcactttgacattggattccttgatgatgccttggactgaccgctctggtgctgccagttgttctttcgtggcgctccatatggcttcagctgtctcactgcttaacagttcgtcaatgccaaaatagcgtttcaattccaagtgcgtccaatggtagagagggttgcccattgtataagggactgtttccgcccatttaagaaacttctctttgtcatccccatcgcctgtaataaacgtttcctcgacgccgacagcacgcattgcccgccatttgtaatggtccccatggagccaaatttcgctaatgttgttaaattggcggttttcggcaatttcttgtggggggacatggcaatggtagtctataatcggcagcgtttttgcatacgtatggtaaagtgtttctgctgtcttattttgcaacataaaattttcgtgaatgaatgcttttcctgttgagatcatttatttcagctcctccatcgctactgtgtccatatccgtaaacgtgtaattttctccagccatcgcccagataaatgtgtaattgcttgtgccaacgcctgaatgaatcgaccatggcggcgaaatgacagcctgttcatttttgatcactagatggcgcgtttcctgtggctgacccataaagtggaacacacgcgtatcttcttccatatcaaaatacaaataggcttccatccgcctgtcatgaagatgagcaggcattgtattccacatattgtttggctcaagcagcgtcatccctaccattaactggcagctttcaattccgtctttatggacatacttgtaaatcgtgcggttattggattcagcatctgaacctaatttcgtcggttgcgcttctccaatcggtgccaattttgtcggatatgtttgatgggcagtggctgacactaaataaaaccgggctggtcgttgtggatcgttgcttgcaaattcgacatgttcattgcctctaccgacatagaggcagtcacgctttgccattttatatgtgtcttttccgaccgttactgtcccttcaccaccgatattgataacagccaactcccgcctttcaagaaaataatcggtttttaaagcatcgcctgcgtctagggcaatcgcttcatggcttggaacagcgccgccgattattaatcggtcatagtgggagtagcttaaatggagcgccccctcttcaaacagcgattcgactaagaaagcttctctcatttcctctgttgtatacgttttgaaatcttttggccctacttcataacgaatatccatttccatttccccttttcacttgttagagtcgcaatggttcgtttatgcacttaaccaaccgccatcgacagctagaatatggccattcacatagtttgacgcctccgacgcgagaaaaacaacagggcctttcaaatcatccggcaacccccattcgcctttcggaattcgtgagctaatgtaagtataacggctttcatctgtacgaatcccttctgtattgtctgttaccatataccctggggcaatcgcattgacacgcaccccttttttggcccactcattggcaagtgctttcgtcaaaccggcaacggcatgtttgcttgctgtataggcggcaacgcgcaatccgccttggaacgacagcatcgaggccacgttaataatcgatcctgatcccttttcaagcatatgtgcgccaatttcccgagacagcgtaaatacagcatccaagttgacgtgcagcacttcccgccaagatgcatcatccaacacgtttgcatcagcccgcttaatgataccggcattattgaccaatatgtcaacgctttcaacatgatccaaaactttagcggccaattcctttgccccatcaggctgagataaatcggcgtttatcccataaaatcgcccgccaatttcctctactttttgttttgtttccatcatatcgctaattcctgcaccaatgatgttagcacccgcttcggcaagtccgagcgccatcccttggccaagccctcggctagcgccagtgacgacggctgtttttcctgcaagcgaaaacatttccatccccactccccccttatttgtttgttttggttcatttacgtttgatcataccatagctttaaacagcttacaactaggcattgttttttactgcacttgttaataaacattgatgccgtattcattctccaagacgcttcgcgtttcactgtctaacaagtcatcgctgacaagttcgtcaatttctgtgatgtctgcaaatcgcattaaaccaacttggccaaacttgcttgaatcagacagcaagattgtttttcgtccgcaattgatggccgctcttttccattcatagtgaaagctgtttagtatcgataagccgtgatcaatagagacgccagtcgcccctaaaaatactttttgcacatacaacgacttgagcattgccgtcgtttgctggctatacagtgccgaagaagtgccaaggcgtgttcctccgagcaaaataagctggattgcttctttttcgtaaagggcgttcgcgatccggatgtcattagtaatgactgtcatcggcttgtcgccaaggcgctcagcaagggcaagcgtcgtactgccgccatctagcaaaatcacgtcattctcacaaatcaacgcttttgctttttccgcaatagcgtgcttttccttttcatttctttgctcccgttcctgaatcggaaacaagcttgtatcggtttccattaatacggcaccaccatgaacacgcttgagcagctttttttcttcgaggcgctctaaatctaggcggattgttttttcggtaacaccaagccattcgctcgcttgggaaacgcgtatcgatttgtgtttcgctaaataggcaagcagtttttcgtgccgttccaatgtgaacatgattcttcacctctctgttccattatcacacataaccgaacataaataaacataaaaacaggcagctttttataaaactgcctgtgtgtataccgcataccgactctctcatttactgcctaccctagaaatggaatgacaagacctccgtaaacaaatgaggcgacaatcactaatgccggatggacttttgcctttgtcaatagcagaaaagcaaccgctgcaattgccaatgactgaagccaaccaatttgggcagcagcatcgccaatgatatcgaacgtcaacactaccatcaatatgcaaataacaggttgaacagcaagggaaatgcctttgaccacatttgactggcggtactttcgcaaaacacgcatcaacaaaatcatggccagcgctgatggaacaatggtcgctgcatgagcaacgataaaccctggccagcccccggcagcaaacccgacatacgcagcaatttttgttgcaatcggccctggcagagcattggccaaggcaaggacattggaaaactcatcgctcgtcaaccactgatagcggttgacaatttcctcaaacataagcggaatggaagccgggcctccaccatagcctagcaagttagcaagaaaaaatgcgataaataaatataataaaatcatgacgactctcctttttgcctgctccgccatttatccatcagtttataatgaaacacaccgtaaataatgaaggcaataatcacaaagccaggatgtacgtcaaacccttgcaaagcggcaaaggcaataacaaaagtgagcatgccaaaaacccagccaaaacctttaaccgccttcttgccaaaatcatacgccatttgcgcaagcaatacggcgataacaggtgtaactgcgcctatcatgccagcaaccacttccgaaccactaatagcatcaacaagcgaaaaaagcaacaccatcgctacactcgtaggaaaaatgtgccacaacgttgcccaacaagcacccgtccagcccttcaatcgataacctaaataggctgccattttcgttgccactggtcctggcaacgtattagcaatcgccagcgtctcgccaaattcttcattgtccatccatttatacgtatcaacagcttccactcgaaacagtggcatgacagacgggccgccgccaaacccaaacagccctgtccgcagcatcgctagtgctagctgcctatattgcgttgtggtttccttctccactgccgttatccctcttttctctattcattcgtagtttacaaagctccgcttagcgctataaccgaattttagcaatgtcaaagtcagggacaagcccttgtttcattgctcggcctaacaagttctcaatcgcttgatagccatcttctccaagtgacttcgtaaactcatttacgtaaagttcaatatgagcattggcgacttcttctgaaagctcttgggcatgggaaagcacataatcgcttgtctcttcagggtgtgcccatgcatactcaactgattgtcgggcccacttggccaattgctctttatcgagagaacgcttggcaataattgcgcctaacggaatcggatatcctgtatcttgttcccaccattcgcctagatcttgcaacagggacaggccatacgtttcgtatgtaaagcgtgcttcgtggatgacaagccctgcatcgacttctccttttgcgactgcaggcataatacggtcaaatggcatcacttttataaagatgttatttttaggaagtttttgttcagtccagagacggaacaataagtatgcagtcgagcggtcacttggcacagcaaccgttttcccttcaagagtcgctgcttcttgcggctctttcgttaacacaaggggtccgcacccacgaccaagagcgcctccgctcggcactagacaataatggtccagtacatacggcaacgcagcataagaaattttcatgacttcaggccccgtctgatcaatcgcccagtagttggtgcggtcaatatcagcataggttacatttaacttaggggcaccagcaatctttccgtgaacccatgcataaaagacaaatgtgtcatttggacatggtgaaaaggcaatctccaagttgttcaacctccttcaatttttctgctgctttcgtcaacgacgaaaaagcactcgcaaattcccagcttgctttatcgcgaatgcctacttggtttgaaatggacctaacctcggcaaaaggcaagccaaactccgctgctgcactagctactccaaacccttccatcgcttccgccactacatcttttccataggattggcggacgtttaacgtcgcttctgtcccagtcacagtcatcacggacaaaattgtacccgttgccacagatacagcttcttgaagtttcccaatataagaatcgtttgcaactgcaggcaacgtttgtgtaccaaaaccgagcgcatcaatcgtcaaaaacccttcaggtgactctgctcctatttccggggcaataatcgacgttgcgacagcaaccgtgccatttgccgcttttccagggaagccacccgcaatccccatgtttatcgttccctgataatgtttttgggcgagctgccttgctgtacgtgcagctgcctgggccatccctacgccgccaacgagtacttcataggctgaagaatttcccaacccttgtaagacagcctgtttttcaggttctacggaaacgactatcaaaataggcttcttgtctaccacgcgccaacaatcctttccaacaattctaacggtctagtataccataaatgaagttgccaacaaagtccatttgtttgctttcgagccagttcaatataataatcgcttctattacctatacatgcaacaagaaatcgttcatagaatgtattatctgacaaataaggagtgaatttggatgaaagaatcatttttgaaagcgcttactttatttttgttgtccttcctgcttttatggccgcaagcttcagcacacgctgggtttcttggcgcaggaaaaccagcgcccggcgctccgccaggaacctgggttgttggtgatacaccagcaacgactgccggatcgccgatcttgtttgtccatggtcttaatagttccgcgctcacttggttcgagccaaatgacatgttcgtacacacatatgagcaaggatttccgagcgcttacatcaatttgcacccagataaatcaaactggcaaaatggcgagttactagcagaaaaaattcgcgatatttaccaccatttcggtgaaaaggtcacaattgttgcccatagcaaaggcggcgtcgatacgcaaactgcgctcctacactatggggctgaaccttatgtaaaagaagtcattacgctcggttcgcctcaccacggaagcgaactcgccaacttagcatatagcaactgggctggctggctcgcggaaatcatcggccaacgctcagaaggcacagactctttgcaaacagggaacatggcctattttcgagcgcaaacagacgggttaatctctgcacaatctgtccccttttcgacgatttcaggaacatcctggggctcatttggatctgctctctatttcggcggagtgtatttgcaatttttcggcacgaatgatggggctgtgacagtgaatagctctagactaagctacgcccgagaacttgcttccaaccggtgggatcatatgcaagtggcgcaaggccatcttattttccctttgctgcaagcgcaaatgggtgcacaagcgaaggaagaagagcatgcgaagtccatgagcgcaactataatccgcggcggccaatttaacgaaaatggcagccaggcttttgccatcgagccaaacgtaaaaaaagcacaaatctcggtacttgccaatgaaaagcttgactccgctgaacttcactctccagatgggcaagtctattctgttgccgccgtcgctgccgagcaagagcacagtgttttttacggagcttatgctcatcattttaaattggaccatccgagtgctggagaatgggaactaaaaatgaaacacccgcaaacaacagcctatttagcggttatcgcacttgaaggcggcgtttcgccagccatcgcttttgacggcgttcgcctccagtctgacattgacccgaatgccatcgatgtcagcaaaacacgctacaccatccatgtcaatgatgacaacatcacagccaatgctgcttcgcttcacgcgctgccgccccaaaaagatacttcgcaaacgattaccattgatattgaaggaatgacaagaaacggtgatcgctttgaacggacgatcgttgccaaccgctatgtcgacaagcatggcactatttatgaatgatcgaaaaattattttgatggcaccggcaagttttagaaaccctacactcaattacccgtaataacaaaaaggaaccataccaaaacagcaggtccattaaaacattgaagtgacaaatactcaataatagttaaaggttcctttttcgatatcgaaaaaggaaccttatcggcgaaacataactggcagctgctgctttcaatgaatgacattgcttactgtcggttgcaactcattctcttttaatataactctaatacaattttccagccttaaataatcttgtttcgttggattgttcacattcaatatacagacgaccgctccgtttgccttttctttttttaacgttacataatcgcggtctgaaacaatcaaatctggcgtttcccctcgctcacaaaaacgcgagtggggataaacttcttgcaccatttttaaacctacgttttttcctgcttcgccaaaaatggaatacagctttatttttatgggttttactgcaccatcaaaacccagtacatttcttaataaaaatcgatacctatctaacaattctcgttttgtctttttatctaaccaaaccacttgtgtggtcaaatgatacagaaacgagtcaatcaattggtcaggttctgtttcagaaaggtcgttactgaaaaaaaaggaattccccctaaaataactttctgccaaatgaatgttgattaagttagcatataatgtcgtatattcttcgccactaatcgcgacgccaaaaaaatcaataaagcgatccaaccattgaatcgtatgttttacaaaatctgcagaagcgttggaaaaagcattctggataaaagaaatggaacgttggtcgcccttttctatataagaaaaagaaataaacgctaagaataaaaaagcaatttcatcctctaaatcccgatcatttatttttgtaagctccttataataggtatagatgcctttccgaaattgctcaaacaaaggatgtgttttcacaaacacgtcaaaaaaacgatccctggcaatggtaaaccctttgcggattctagttacgtttacacctacccaatacaacaacgattcctggcaacgcccaaacgccttgtccaataacgcttctgcttgtttaatactaattacgtcaaatggccattcttctgcccagttggaatcccaataaaaaagatagtaaaaataacggatttgtttttcgtctccatgaataatgggctccctttttaattgaatgtccaaatcaaacgtatttaaaagcggcactaatcgtttgagagaacgataaagggatccataactaacatatgcttcatttgaaaacttcacgctattgacaaactgacccttgaatacagtatccaaaaattgataaggcaacgagtgttggttatacatccgttcgattgtcttaacagaaaacgcaaatgagcgttccaaccaatagccttttgttttttctgagcgaacgattttggcttggtctgttaaggtttctagttccatagccaattcatgtacatttttcttcgctgttcgtttttcaataccgcatacttctgctatttgtgtaagtgagacactttgactttgggcctccaaaaaccttagaattcgtactttagaaactgcactcccattcaaaaaataatccaagccattcacctcttctcttgcttcaataaattaaattgttctattcattctctgtctttatttaaatctatgctactgtcggagagacgctcatgcctattttttttacaatgcattctccttacgaaaaacgcgtcacatagacctttgacattcaggtttgagaggtgcattggcaagaagcatgccctctggtgacatgcttacgcagtatgttcgctttttccaaaagcaaaaaccaatacttttgcctcgttcactttaaggctaaaaacgatgcactgtttaagttgtaggatacgcataaataacaaatcgctcaggggcgcttcctacataatgaaaaggataacaagtcgtgatgactaacacttcctcccccatttttcgaatgacagaagtatcatctgcggaaacaatttcagtttcttttagctcatacgtaaatttgccataaggcatcgttacaataaaagagtcgcctatttccagctcgccaaaattacgaaatacagtgtctctatggccagataacaatatctgttcattttgcccaggaaaagcagattcggataaatgaccgactccatttttcaaagcctcttcattggtcccttctacaacggcgattgtccgatctagctttggaatctctaatgttgcaaaggcttcgtgagcgtctggacgaaaggtttcgacagcaccgccgtcttcgtctcctccagcatgtagccattcacgttcggctttttctatatacgctttcgcttctaccagtgatttgtcttgagcgcgttcatgagccattagttgataaacaaatgcccctaaaacaattagacctgttatgattagcaaatttccaattcgtttcatatcgcggtcctctctatttaaacaatcgtgattcagccctcatgtgcacaaaatagcgacagtagccagataagtaatgttctacatcatcaatacggcttcgaaatgaatgatggcgaataaaaaagctaccaagaattctagaagggtttttataatacatagccaattctggataaaaatatccatttcgttgatattctgcgcgtttgtgaatggtgtcttgaagttttttttcatcgaattctgctaaaagggttcgatgctctgtttctttcattcgctgaatcatattgtaagctgccaatgtcaattctaaaaaagtcgggtatgtggtgatgcgatgatagataaaatccaatttagcttgaacattttgtaggccaaattgaaagtacttccgcaatggcttataacgtgtcaattcctctgtacaataactaagccagtgatcatgatttttccaatattcgttagcaatgaagtaatcaaacgctttttcaactgtcttcatccatttttcatttttgtctaattgatagagccttagcaaagcaaaagcagcttctccatcataataaacaattcgaaacgcatcttttaattcgaaagatggataatggaggacatggtgaaagccgccattttcttgttgaagctgacatatcccatttgccagctgttgggcaacttgaaggtaacgatcattttggaaaacgtccgtatactttgtaaaagcaagaatggcggctgcattcgctcctaatttaacttccaactgatcttgttcgactccgtcgacaacataggcagtcccttgctttttatcaacatgtagccccttcagcaaatattcaaggcctctttcaattgccggaatggcttctttatcctgagtaatttctagcgcttcgatcatcgcataaagtgtactggcatgtctcaacaaattataaaactgaatttctttatcaaaacaagaaaaatacccatatgtaaattggcctgccgctttattcattttagccaaataattaagtccactagcaatcattgcttttactgccgcagcgtctaaagcagtatcccgtcttccgttgtcccttggcccctctttaagggcataaagctgctgattttctaaaaagtaacctttcgttgtaaaggtgataaccgaggaaactttgttgaagtctaattgttttaaatgagggcgatggttccgaatataagattgaatgtttttttcatttaaataccctcgctttgtatctttgtcaatttgaatcatggcgtttccattgatctcttgctctaaaaaagcatggctgaagttttcatcaaaactgattccttgcctaaagtaattcttttttgttttggtcataatgttaataaacgacaaaagcgagtgttgttcaatactggtaacccagtcaattttcaaacaggaatattcctgcttcatgagggaaatccctctgttgtaaagacgtttccaagcgcgctgaaaactattctccttgacggttaatacggttgctcgtttatctaaatagccgatagaaagaaacaagataaccggcttttcttttcgtagttccttgtactcctctgactcggtcataaatgcatgcagttgatccatatcacgattaaatatttgggtaaggttctggttcatggctcaacctcctggattagttaaagggaagcaaatgctaatagcgcatttgcttccttatttaacacttctatttctttcttctaaatagacgagcacttattccagctaatagtgctgccattcccgtaactcctacagtccaaatggaagttgctgtatcagggagcttcttcccatctttcgaagagtcttgcctaccagtatagtctcgatcaacccgatttttatcagtaaccctgtccttgtccgtatcagcgtcagcgtccgcatccgcgtcggcatcggtgtccgcatccgcgtcagcgtccgcatccgcatcggcgtctgcatcagcgtcggcatccgcgtcagcgtcagcgtccgcatccgcgtcggcatcggcgtccgcatcggcgtcagcgtccgcatccgcatccgcgtctgcatcagcgtcggcatccgcgtcagcgtcagcgtccgcatccgcatcagcgtccgcatccgcatcagcgtcagcgtccgcatcggcgtcagcgtccgcatccgcgtcggcatccgcatccgcatcagcgtcggcgtccgcatccgcgtccgcatccgcatcggcatccgcgtccgcatccgcatcagcgtcggcgtccgcatcagcgtcggcatccgcatccgcatcagcgtcggcgtccgcatccgcatccgcatcagcgtcggcgtccgcatccgcgtcggcgtccgcatccgcgtcggcgtccgcatcggcgtccgcatccgcatcagcgtcggcgtcagcgtccgcatcggcgtccgcatccgcatcagcgtccgcatccgcatccgcgtcggcgtccgcatcggcgtcggcgtccgcatccgcatcagcgtcggcatcggcgtcagcgtcggcgtccgcatcggcatcagcgtccgcatccgcgtcggcatcagcatccgcatcggcatcagcgtccgcatcagcgtccgcatccgcatcggcatcagcatcagcgtccgcgtcggcatccgcatcggcatcagcgtccgcatcagcgtccgcatccgcatccgcatcagcgtccgcgtcggcatccgcgtcagcgtccgcgtcggcatccgcatccgcatccgcgtccgcatccgcatcagcgtcggcgtcagcgtccgcatccgcatccgcatcagcgtcggcatccgcatccgcatccgcgtcggcgtctgcatcagcgtccgcatccgcatccgcatcagcgtcggcgtccgcatccgcgtccgcatcagcgtcggcatcagcgtcggcatcggcgtcagcgtccgcatccgcgtcggcgtccgcatcagcatcggcatcagcgtccgcatccgcatcggcatcagcgtccgcatccgcatcagcatcggcatcagcgtccgcgtcggcatccgcatccgcatcactgtcatcatcaaatattactgtatcataatcaccaatgctatttagcaattgaaggtcaattgtgctatcgtgtacacctgcgccgtaaattggaacttctccagatacgtcggtgccatccacttttgcgttcagcgtaacttctgtacttccaagcaattgcacgcctgccaagtcattggatagatcaacagctccactggaaatattatcaattagacctaaaagcggttggacaagcgcttgaagaggctctagaggaacagaaataccgccgcccaaaatgtcaatgctgacattgccgattgcatctacaacatcattcagtaattgaaccaccacatcttgaaccgctgattcaaggtggtttcctaagccatctgaaaaattaacaagaattgaaccgtctggctggacgactgcttctacttcatcattataagcaagcagatcagctagcgccccatctatattattaagcgcacttagagcatcttgtaattctgttaatccacttacacgaattaaaggagccgtaattggattatttacaatcccatccactgtattaaccaagtcattaactacagtgtttaattgctgcgtgatatcccctattaaattgcctaaagttggcaaagcatccattgtaactggaaggatttctaccctgacttgcgctggcccttctacggtccacttatcagcaaggtcaggagaataaaagataaccgtacgctctggaccgaagagctcagcatcagcaaggcctcgcccagttaaagaaagcccaagatcataaagcccattttcatcagcatcaccaagttgagcattgactgcaacatccgtcaataattgaaactctgttagactagctgccgaagcataggcacttgggttcgtcaatacatttccagatacaccttcagcattaataagattgctgaaaggcactattgttagagttgtaatcgccgtagaagcgaccacttttgaaagagtgttcatttttcttttttgcctatttttcatctttttcttgtaatcgtactttttcgaagacaatagttcacacttcctctgttaagtattttttctcggtaactttattggtaaaaagcaaaaaagcatacataataaagccatttttccgaatattgaccgcgcactaaaaagctattttgaatagccattgctgccctgaatcgtatatgcgctgatagccgacagcggttttgtttaccgagaaatgacaaggattgcttgcgaatgcttcataacgtactttttaaaatctgcttaaacgaataggaaaagaaaaacgatcactccccttttcatgtttggtttctcctaagcacacatcttaaacaaagaggaactaaggcctatttatacgaaacaaataggtctatttatttattttagtgtacttgatacgcatgatagcatacgaatagtctagtcacgtatcatcttttccctacttacataccattcacacaacccaacacaacacttaaggcctgtaccaaaagatgcataagattgactgtacgatccttctagggaactactcccattgaaaaaagacctgatatgaagccactacttttagcaaagaaaccgttaatgtcaggcggattaacaccattaaaaccctttaaatagaatatgtatgttggtttaataattcatttttcctagtatgtttttaatctattaaattttattttctgtgatagaaatatctcaacaaacctttaaaagatttccctttatttagacatgttatgataggtattctttaagatctctattaaaattgcttaactatattcatatatatatatataaataaaagcgttgatacagggctttgatgaggattaagtaggaacaaaggagataaaacacgtggaagatttggtagcttatgagaacgatttttgaaaggaggtactagaaaacaattccgccatttagccctgctttaaactaaaaacggtacattctatgcctcctaaattatttatgggaggttcttttctgtacttaaaaatcttttttaaacggcctcttttagctgactgtaaaaaataaatggggctactattagagttgatgacgatggagagacagccatacgggcctgctttgtgctttaagaatacacttgatctccttcagcgcttaatgattgaatgaatctgcctccaaaaggggattggtgccaattttggtggaaaacccagtatcagcctttaacacaaaaaagccgcaatgaaccagctttcatgatccctcacggcgtttcaatgtacggttccttctaaacctatacgcctttcaaccactcatcgactttatcttggttagcattcacccatttttccgctgcttcttctggctccattccgtcttttgccatatacaacatgacttcattcatatcatctgctgtccagtagaattggtcgagaatccgatacgcttctggcttttcttcggccaagcctgcgcggacaattgtgcggatttctccatttgcttcatagatgcctttgctgtcctcaagaaattttagatcatacgaattaaacttccagtgaggttgccaagcggtaatgacaattggttcttgcgccgcatagcggttgccaagctctgccgtcataatcgcatctgaacttgctgacaacgtaacgtcatccattccatattcacgaagcgcctcttccgttgtcatcattacgcctgcgccagcgtcaatgcctgtgatggtactgacgacgtcagccgacaattcttcgatgctgtcaatctccatatacgttgggacagctaagccagtttgtgccccttccaaattagctcctaaatcgataatgtcatctttatgctgttcatagtggactttcatatcttctggcagccatccggcaacatgggcatcggcgcttccgtctgccactgacgaccacatgattccttgctcaacacttgttaacgtcacatcataaccggcttgttccaaagcaatcttcactacatggtttgaagcgatttcagaatcccatacaacgtaaacgagttcaatttctttggcttcttccccttgggcgccacaggccgacatcataggcaaagccaatagcaaaaacgcaagcaagcgaatggttttcattaccgatcatcctctcaattatgtataatatatttaaaacgaattaaatattttagacactatactaacatagcctctcgttctgtcaacatccaacagaacccgccagtctttcgctaccttgctttattacaggtaaacagctatactatcgctaaatttcgttaaattgcaattgaggtgttgaaatggaaaaggatgaacatgcttttgaaaaattagagcaagcgcacgctatcattaaagacggcatagccgatacgatggacatttatggggtaaaccgttcagtcgggcaactttatgcgactttgtatttaaacgacgggccaatgacgctcgatgaccttcgcgatgaattaggaatgagtaaaggcagcatgagtattggtgtacgcaaacttctagaagaaaaaattatccaccgcgtgtaccgaaaaggcgagcgtaaagacttgtatgaggctgaaaaagacttctttcaattttttatttccttttttacgcggagatgggaacgggaacgtagcgtaaaccttcaggcagttaaacaagccattcctctgtatgaagcattagtggatgatgctgagacgccagatgaggtacgggcggaagccgcacacacattaaaaaaaataacggcttctcttgaatattatgagtttcttggtttgctagtcgaacagttccaaactggaaaccttgccaaagatctagtagaacgctataaaaacgaaaacggcacctcctaacaaagaacttagctgctacaaccatatcaagttttcgttaaagaacctcctaaaatagtgatccttacaatgggcatctattttaggaggattttttttgacacaaacaaacagaaatgctatgtttattttgtataaaacgtttaatatatattaaacaaaacaaaggagagaggttgatgattcgcggaaagatgtttattaacggggaatggacggatgcaaagaatggccgcgttcgagaaattattaatccttttaaccaggaagtgatcgcaacagtgccagaaggttcggctgaagacagccacgctgcgattgcagccgcccgagctgcctttgatgaaggcgtttggtccgctgcatccgcaagtgaacgaggtgaacgggtgcgtctaattggccaaaaaatagccaatcaaaacgaggaatttgcccgtttggagtcgcttgatacaggtaaaacgcttgaagaaagccgaacagatatggaagacatcgccaatgtgtttttttattttgctggtctggcggacaaaaatggaggcgaggtcattcggagcccgcttccgaactcaacaagcatcgttgtccgtgaacctgtaggcgtgtgcgggctaattacgccttggaattatccgttgttgcaagcagcatggaaattggcgcctgcactcgttgccggaaatacccttattttaaagccaagcgaacttacacctcttacgacgatgaagctatttgagctgtttgaagaagtcgggcttccaacaggagtggccaatcttgtgcttggcacaggcaaggaagttggcgcaccgcttgccgaaagtacagatgtcgacttgatctcatttactggaggcattgaaacaggcaagaccatcatgcaagcggcaagcagtaacgttaaaaaaatggctttagaacttggcggcaaaaaccctaatatcgtctttgctgatgccgattttgagacagccattgaccaagccttaaacgctgtctttttccatgctggccaggtttgttcagctggctcgcgcttgcttgtggaagaagcgattcatgatgatttcgtagaagagttagtaaagcggacgaaacgtatcaagcttggcaatggttttgatgaaaaaacagagtctgggccgcttatctcggccgcccaccgcgccaaagttgaaagctacattcaaatcggattagatgaaggcgctacacttgcttgtggcgggaaacgcccagatgcggcagaactgcaaaacggcttttttctagaaccgactatttttacgaactgccgcagcagcatgcgcatcgtccaagaagaagtgtttggtcctgtacttacagtcgaaacattcagaacaacagaagaagcgatcgcaaaggcaaatgacaccatctatgggcttgctggcgctattttttccaatgatattggcaaagcagaacgcattgcaagcaaacttcgtttaggaacggtatggatcaatgactttcacccatactttgtccaagcaccttggggaggttacaaacaatctggcttcgggcgggaattaggcaaaatcggcttagaagagtacacggaaacaaagcatattttccgcaataagcaaccgcaaccaatcggctggttccgcgggtaaaatgaattgaggagcgataaacatgagcatgcatatgaaaattgaatcgatgttaaactaccatacttttgaagtgccgaccgctattaagcatggcattggcgctatctcccaccttggcgaagaagtccgcgcccttggttccaaaaaaatattgcttgtgacggaccctggcatttacaacgcaggcattacaagaccagtcgaacaaagcctcgagaaagcgggcattgacgtcgtccttttcaacgaagttgagcccaatccaccaacacgattaatcgccaaaggttccagcgtttatgcggaacatcgctgcgacggcttagtggctgtcggcggcggctcttctatggatacagctaaagcaattggcgtggaagtgacacacgaaggcacagtccttgattacgaagcagcagagggcaagaagccgcttaaacggcgaattccaccattggcaactgttccaaccactgccggaacaggttcggaagtgacgcaatgggcagtcattacggatgaacaacggaaatacaaattcaatacaggcggccctcttattgctgcacacgtaaccattattgatccacaattgcatacttcaatgcctcctcatgtcacagcgatgacaggcattgatgccatagcccatgccattgagtgctacacgatgaaatatgcacaaccggttacagatgctgtcgccttgttggcaattgaatatgcagccacctacatacgccgcgcttttgcagacggggatgacctagaagcacgctatgggatggcgcaagctgcaatgttggcggggctttcctatggaagcgaatcggctggggccgcccacgcaatgagccagtcccttggcggcatcgtccctgtagctcatggacaatgtgtggcagcgatgatgggaccggtcatggaattcaactggaaaggagcgcctgaacgttttgcccgcattgcccaagcattcggcctaaacacaacggctatgacaaccaatgaggcggccaaggcagcagtccgctatatgtatgagttagttgaagagctggaaatcccatcgcttgaagaccaaggtgttgacaaaacacaaattagccgttgggccgaagaagcgttgaaagatccacaaaccatcggaaatcctcgtgacttgacgcttgctgattatgaatggatttacaaacgctgctttaacctcgtaccaagcaccctttaaacaaaacgaagagcaagccgcttttgcgcggcttgctcaatttactggctgtcgtcctcttgtttttgcttatcatattccattaatgcttgttcgacattgactaaatgaaccatcatcgcctggtgggctttgtctttgtcttgcgcttccaccgccttataaatttgctcatgctcatcatgaagctgtttaagcgtttgtgtttcggcgtaaaggctgatttttcggctttcatacatggtcatcacgagcgtgtcagacaacttttgcatcatttccatcagcaaatcgttttctgtcgcctcggccaaagcgagatgaaatcgaacatcggcctcctcgcctaaatccttgccagcttctgccttggccatttgcgaaagcgcctcttcgatcttggcaagatggtcagcgctgcggttttcagccgccaaactcgcgacgccgacttcgaggatttttcgcacttggaataaatcctgtttctctttattcgacaaaacgcccttgattccgactggtttgaccatacttgaaaaatcgaatttattaacaaatgtgccttctccttggcggatcgtcacaagcccgactgcacgcaatgcgctcaatgcttccctaacggctgatcgacttacttgaaatgtcgccgacagcttttcaactgaatcgagtttttcccctggttgaatatcgccactccgaatcatgtcctcgagttggtcgcggattagttcggacacttttttagactttacttgttttaaggacatagcaaacacctcatttgcaacttctcgttttaagtatagcatatgcaaacgagcaacatccttttgctgactagtaaaaagcatctgcagtatccttcttctacctgaagcaacatttaacaactaaaaggccagcggtaacgcgctggccttgggtgttttttacttgtcgtcgactactatatagcacgcttttagcgggccgtgcacgccaactactaaactcatttcaatatccgcactgttgcttggccctgaaataaaattgatgcatgatgggaggcgtccttcgcctgttagttgccgaatgtggcgcgccgcttgcgtcatccgcgctactagcgtgcttttcgggatgatcgcgatataatagcgcggcaacaaactgacagaacgccctttgccattgctgctaaacaatgtcactgttcccgactcagcaagagtgatatcggaaaaggtaatgcctacgtctgctatttctgcctgctcaatcgaacgtttgctgtcacgattgtcccataatgaaacagaggggcgcgtcaaaaaggagccgaggccaaactcatgaaaacgacggtcatcccaagcaatgaccgatttcgctccatacatgtcgattgtttcatcaagtgccgtctctaactgaccgctctccacttgtttaaagtctgtatgaatcgccacgcattgttctttcagcactgtgaccaactcatcttttgaagcgtcttttaatacttcaaattgaggggaaactcgataattgggccgtaacaccccttctgtttggcggggccggccaagttgattggccacatgatcgagaaaagaatcgcggtttttaatcatgcgccccctccttttgccgtgctttaaaccaatcacggaaccgttctttggccggagctggcaaatggcggacatctgtccaaccttttagcggccctggcccttttggaattgcgccatcctttacaaacgggaacagcaaaaatggcactactttggttccagccttatacaacataggcgaacttgcaccaattccaaaccctttcatcgccaacgcctccgttcgcgcagtccgcttttgttcggcgataacgcgacgatgcttaatcaacagttcgtgaaggggaattttgacagggcacgcatccgtgcaagccgcacataagcttgacgcgtaaggcaactctttgtggtcttcatacccttccaacaacggtgttaatactgccccaatcggccctggataaatcgagccgtaggaatgaccgccgacgtggcggtacacagggcagacattgatgcaagctgcgcagcggatgcaatgaagcgctgcttggaattcagtgccgagaatattggagcgcccattatcgacaatgacgaggtgaaactcttcaggaccatcggcatcgccatcttcacgaggacctgtgaggcctgtcacataactcgttaatttttggccgactgcacttcggcaaagcatgctaactaaaatgtcaagttcttcccatgtcggcacaatccgttccatccccataacggcaatatgtgttttaggcagtgcggtcgcgaggcgggcatttccctcattcgtgaccaacgaaatgcttcctgattctgctacggcaaaattgcagcctgtaatgcccacatctgctgacaaaaactctttgcggagctgttcacgagcaaacaacgtcagctcttggggattctctgactttgtataacctttgcgggctttaaacgtatcacggatctgttctttatttttgtgcaatgctggcgcgacgatatgggaagggggatcatggtcgtctatttgtaaaatgtactcccccaggtcggtttcaatgacttcgcagccaatgtcttcgagcgctttgttcatgctaatttcttcggttaccatcgatttggatttgacgactttttgcgcttctttgctgcttacaatttccttgatatactgattcgcttcttcagccgtttgcgcaaaataaacatgtcctcccgccttctcaacgttttcgctaagctggtgcaaataaaaatcaatatgattgagcgtgtgtgagcggatttcttctgcgagtgtgcgccactcctcccaattgccaagctccttttccgctgaaccttttgatgttttcagccgttcctgggccgagctgaccgcttggcgcataaaaccgtcttggagccctttttcaacccgttttgaaaaaggggcatcgcttattttaatggccacattcctcactccttgctatttaagacttgggcaatatgctttacttcaatcgttttgccgtttcgttcgatccgcccgccaatgttcatcaaacaaccgcaatcggcgccaataagcaggtcagcacctgtcgcttcgatatggccgactttttcttccaccatttgttccgaaattgcaggcattttgactgaaaatgtaccgccaaagccacagcacgactccttgtttgccagtggagccagctcaaggccctttacttgttccaacaaagaaaagggtgcctctgtttcccttaataaccgcgacatatggcaagaggtatggtatgtcgcttttttatggcaaactgcgccaatgtcttcgacttttaggacgcggacaaggaattgggtcagttcatacgttttgcttgcaagctcttctgctcgtttttcccactcaggatcgtctgcaaatagttccttgtattcgaggagcatagcagcgcaggaccctgacggcagcacaacataatcggcatcggcaaacgtttcaatggtatgtttggctgcttttttcgtatcttcatgataaccgctgttaaatgccggttgcccgcagcaaatctggttttctggaaatttgacgttacacccatggcgttcaagcacttctacagtgtctttcccaacacctggataaaaaatgtccgctagacatgtgacgaatagcgaaacgttcacattaccatccccttatagcgttgatacttttttgttgttttctatgttggccaatttggctttacgctggtatttgaggatcatgattagaaaaacaagtaagacagttgccacaaacaacgtgccgatatgaagcccaaacccatgtatggctacgtagcctagcccaccagcaaaaacgagataatatgttagcggaagcaacacttttctaataagtacgccttctttgccaataatccctgccgctgccgctgctgccacaacgttatggacacaaatgatgtttcctgctgctccgccaacagcttgcaaagcaacgatcgtagcaggagaaatgccaacattttctgccgccccaaattggaacaaggcaaacatcatattgctgatcgtattgcttccggctataaatgcgcctagcgcgccaataactggcgctacgactggccaatgctcgccaaccatttttgacacgccttcagccagcaagagcggcatcgactcatacccatttgcattgacgccagagttaataaacacttgcaccattggcacggcaaacaaaagtgctggtgcggcactgacaatcatttttgccgagttgcttactgccgtacggtaagaagagcgatccatcttgtaaagaaagtaaccaacgaccgacacagctaccataatcgttcctggtaaaaacaacggagtgctggaaatgtcaatcgtcgttccaaacacttgttcaatggtaatcgctactttttttaaagcagcgccaaaaggaagcgcctccatgcgagtaatgactaggataaagccaatgagtatatacggaaaccacgctttaaacattgaaatggtcggtttagtaagaggatctgccgaaagcattcccatccagtcctgttcccatttggaaagaggaggaaaatcccagctcttttttggcatgaaccatccttttttagcggcaggaacaacaattgctaacccaattaggccaccgaaaagcgacggaaattctggaccgagtacattggcgatcaaggcgtaagggaccgtaaatgctaaaccggcaaacagcgcaaacttccacacttccaatccagcccaaatggagcgtttctcaccaaagaacaatgtaagcatcatgaccaacactaatggcaaaaacacaccgatcatcccatggaatatcgccacttggccaccgatagaacgaataaattcgtcggtcgtcattccaagtgcggccgcctgttcagccacatttggcgctcccgagagcccagagttcactccaattaaaatcggcgtgccgacagcgccaaacgaaactggcgttgattggataataagagccgacaggaccgcagccatcgctggaaagccaatagcgacaagaagcggtgcaagtatggccgaaggtgtgccgaagccagatgccccctcaatgaacgagccgaacagccagcaaataataatagcttgtatccgcctatcaggcgtaatagttgtaaatccagcacgaatggtgtggattgcgccactttctcgcaatgtattgagcattaatacagcgccgaacacaataaatagcacttctatagccgtaataatcccttttgtgcttgcggccgccacatagttatatggtacaccccaaaagaaaatggcaactaagcctgtcattagaaaagcaagcggcatcgcccgcttagcaggccaccccaaaagaacaagaagcaacaacactgttaaaattggcgtcagcgctaaaagcgcaagcgaccaaaaccccatcctttctccccctctaccataatgattatatcatacggtcatcagatgactatatgtaagcacttacaaatatagcttactttcatgaatcaggcaagccaatctagtacaatttttacgaaaaggaggttttggcttatcgctaaatagcttctttattgctgttcttgtccttccttctccattatactaaactgagagaaggtgaagaaaatgacaaacgaccaatttaagcaagtcatgactgcatttcgggaagttaacagccaattgcgggaaatcaaaggggatgttgccacgttaaaagacgatgtcgctatcttaaaaagtgatgtttctatcttaaaaaaggatatggctgaacaaaaagtcataactgcccaattacaaaaacatgcagaacatgcctctactacgtttgactttattaaagaaaaactcattaaccacgaacgtgacatttatgcgttaaaacgccgtccataactcttgccaaccccaaaataagcatgctgaagcaggacactgcttggcagtgccctgcttaacctgtttccacaggcaaattttctaatcctctaatgattaagctttgccgccacgctaactcggctggttccgcgcctagacgtatgtcaggacattcttctaaaaggacacggatcgccgattctgcttccaatcgtgcaagcggagcgcctaaacaataatggattccttttccaaatgataaatgggggcttttttctctagtgatgtccagcttatcaggatgttcaacaagcgcttcatcatggttggcagaagcgagcgacacaatgacgaagtctcccttttttatatctttccccataaacgaaaatgattcacgagcccatcggtctgtgctaaattcaacgggactgttatagcgaagcaactcttcaactgcttgagggattagttgatcgtcgtttttcaacaacgccaactggtctggatgcataagcagggccaacatcccatttgcaatcaaattaacggttgtctcatggccagcaacaatgaggagcatgacgacaccataaagttcatttgtcgttaatcggtcaccatcttcttcggcgcggattaaatcagataagaggtcctctcgcggatcttggcgccgggcatgaatcaatgcttgcaagtaagcaagaaagtcgtccatgcccttctgcactgtagtagactcgccgtatccatcgttatcaagatcaacgattaactttgaccaatattggaatttatcgcggtcagaatcagggatgccgagaagctcgcaaatgacgataatcgggattggaaaagcatattcttcgacaaggtcaaagcgctttttttgcttaatccggcgcgcttgttccatcgcgatagcatcgattctgccttttagcctggaaatccgctttggggtaaaccctttttgaataaggcccctaagccgcttatggtctggaggatcgacaaacagcatgctcttgcttatcggcagcatttgttcgtccgaaacttcatctggaaaaacagtacgtgcatctttaataaaccgctcatcctttaacaccgcttccgccacgtcgtaatggaaagccatccaagccgggattccataaggcagcatgactttcgcaaatccggtttgttcccgaatatctttgtaatacgtataaggctgctggtgaaattgatcggaaaaaagatcaattggctcgcttgaggttggcttcaattttatcttcctttcaaatgcgtcgtcccttctactattcgttccaccgcaaccaaactcctttatacggcaaccgctttcacaattaaggcatataaataggcgcatttggccctaatggaaggccagtaaaaatccagacgattaacagcaatgaccatgaaattaagaaccaaatcgaaaagggtagcataactgaaatcagtgtaccaatccccatatttttatcatatttctgggcaaaagcaatgacaatggcgaaataggtcatcagtggcgtaatgatattggtggccgagtctgcgacgcgataagtcgcttgcgccaactcaggcgagtagccaatttgcatcataatcggtacaaacacaggtgccatcatcgcccattttgccgatgcgctgccgacaaacaaattaatgaaggcggtgattaaaataaagccaatgaccactggaatgccgtctaaattcaaggaagtcagcatttcaccacctaaaatccctaaaaataaacctaagttcgattcagaaaagtaagcgacgaattggccagctgtaaaagcgaggacaataaacatgcccattgatgccatcgtgtctgtcatttgcttcgccacatctttatcgcttttaatgtttttcgttacaattccgtaaacaagccctggtatgaggaagagcaacaaaataatcacaacgagagagtccataaacggtgaaacgactatcggttggtcccctgtgccccgcatcggcccccattctggcacaacaagcaaactgattaaggcagcagaaacagcaaaagcgatgccagcataaagcatgccttttttctcgattggtgttaagcgttctaactcgcctgtatagtcccctttataagtgcctaaccgaggctccacaatcttttcggaaacaatcgtaccaacaatcgtaatcaaaatcgttgatacgataataaaccagtaattcatcgcgttattcatttgttcagcgtaaactgggtctactgtcgcggctgcttgcatcgttaattcgccaagcattgggtcggtcgccgataaaagcaagttggcgctaaacccaccggagacgccggcaaacgcagtggcaagccctgctagtgggtgtctgccaagtgctgcataaatgacagcgcctaaaggagggagcaccacgtaacctgcatccgaggcaacgcttgacatcactgccgcaaatacgagccctgccgtgatgaggcggtttggaatcgagagcacaaagcctcttaatccggcactaatcaaaccgctgcgttcacatattccaataccgagcatcgttgcgagtacgacgcctaatggggcgaagccaataaagttgtcaaccatactcgtgaatatataggaaatcccttcaccgctcagcaagttttttacagcaatcgtttctccaggattagctggatcctcgactgaaatgccaaagcttgctacaacgctagatatgaccacgacaagaacagcaagaatcgcaaatagcgtcactggatgtggcaacttattgcctgctttttcaatcccatcaagaaaacgttggaagatcccctttttcctttccactgtggacatacaatcaccctttctatgaaaatgtcttcccacgcctccagggtaaacaggtcgtttctcagaggcaaggctactaaaaaaagtcccaattgcaaatcttcttatcgtgaatttcgtctctattgaaaaagcctgccgacattgatcatcggcaggcttaaacaaaaaacggatgttaaaccatgactttgcacatgttttgtgagaattcgactgggtcttcaagaggcagcccttcaataaggagcgcttggttgtatagcaagttggtatatagctttaatttgtcttcgtcttcctcatatgcttgtttcaaggaatgaaagacgtcatggtttgggttgatttccaatactttttccgcttttacattttggttgtctggcattgcttgtaaaactttttccatttctaacgtaatctcaccatctgcagctaaaaagacaggatggctttttaaacgtttggacgtgcgtacatcttttacttttccatctaaaatgcttttcattttctcaaatagttttttgttctcttcgctgttcgtctcttcctcttgcttttcgtcagtttcaatatccaaatcggcgctggagacagacataaattctttttcatcataagaacggagcattttaatcgcgaactcatctacatcttcagtgaaatagagaatttcatagccttggtcagctaccatttccgtctgcggcagtttggcgattcgttcgttcgactcgcccgtcgcataataaatgtacgtttgcccttctttcatccgcgatacataatcgcttaacgacactagttttttctctgttgaggaatagaagagcagcaagtcttgcaagtcgtctttattggcaccaaagtcattgtacacgccaaattttaattggcgcccgaacgctttataaaacttctcgtatttgtccggctctttcttcagcattgttttcagctggctcttgatttttgacttaatatttttagcgatcagctttagttgcctgtcatgctggagcatttccctagaaatattgagtgaaaggtcttctgaatcaaccatccctttcacaaaactgaagtagtcaggtaaaagctctgcgcatttttccataatcaacacgccgttggcataaagctctaagcctttttcatactctttggagtaataatcaaacggcgtatgctctgggataaataaaatcgcgttgtaacggattgcgccatctactgatacatgaatatgttcaaggggcttatcaaaaccgtaacgcttgtcttgataaaactgttcataatcgctgtcttttagctcacttttgtttttgcgccaaatcggcaccatgctgttaatcgtttgctcttcctggtactctgcatattcgtcttcattgtcttcttttggtttgcttactgttacattcattttgattggatagcggataaaatcagagtactttttaataattgcttttatacggtactcctctaagtattcatcataggattcatcatccgtattttcttttatgtggagtgtgatgaccgtgccgacatcttctttttcagccggttcaattgtatacccatctgtgccatccgattcccatttataagcttggtcgctatcaatggaccgtgtaatgacagtcactttatcagcgaccataaaggcagcgtaaaaaccaacgccaaattggccaataatgtcgtggccgtcttcaatttccgtttctttcttaaaagcgagtgaaccacttttggcaatcgtacctaaattggcttcgagctcttctttcgtcatgccaatccctgtgtctttcattacaagcttgcggttatctttatccgcctctacataaatcgcatagcggtctttttcaaatgaaagcgagtcatccgttaacgagcgataatacattttgtcaattgcatcacttgcatttgagatcagttcgcgcagaaaaatctccttctgcgagtaaatggaattgaccatcatttctaacaaacgctttgattcagcttgaaattgcttcttttccattaaaagagcgctcccttccatccaatcacgaatcttttagcactcgtttgtttagagtgctaacaattctattttactaaaattcacttctgcgtcaattcttttatcggtttaggcatttttgcagttcttttgaggaagacacatccgccttcaaaaccgtggtgaaatggtttaatgaagcgtcgtactcttcttctgtaaaacaggcaaaaccgtctttagggataagcagctgataatcgcgcatgtaggcatcgttggccgtaaactcgacgcacatgttgccaactactcctgtcaaaatgagtgtctgaatattaagctcccttaaaagcatgtctaaaggagaagcgaaaaaccccgagaattggggttttaacaccgaatagtcctctgtatcaggagcaagcagcttcgcaattggtgctcctggcaaacgattgttgacaatatgattatagacctgtgtaaattccgattgccaatcgccataattgtcgttaacataaatgattggccattctttggcgcgtagtattgcctttaagttagcaatcgctttcgcgcagttctttgcatttggcaatagcttatcagcatcgtcaaaatcaaacggattaatcatatcaataataagaagcgcgcaacgttccttcatgttagacctatcccttcttttgaattaaagccagcattaagacaaatccccttttcgccatgaaaccatataaacagatgcctgcaaaagcggccctgccataacaagaatgatcggcaagtacggcagtttcgtttgcaccaacggataaacaacaagtaaggccgctaggacaggatagataatatacatgcttaaataagcagtacggcaagcattagcagtgatttctttctcacgctcatcacgctccgaaaactctggaggcatcaacagccctttttggaacatgataccttttttctttaaataaacgctcacaatcccgtaaatgatcgcgccaacaattataatagtcgtggggagtatattaattgatatttcccatgaccctgttgccgttttaatctcatcaaagccacggaaatattcaacgagctgccatgtaaacaacccgattgtaaccactaaactaacgatcgtaaaccaccatttcaaattcgatcactcctcttcagttaaaaaaaacacatcttctacaggtaattcaaattgcttcgctatttgaagggcaagcaataatgagggcgaataccgccctttttccaaggcaacaatcgtttgccttgtcacccccactgcctcggctagttctccctgtgtcattcgtttttcagcacgcaatacttttaccctgttttcaatctccatagtccaccttctcgattcaattctgcttttattgtatagtacattttactttttgtctagttgactttacaatcaaacattaaaaaaggtacggacgtggttacgtccgtgtgtgcggtacaagaatggtctcgcctgaaaagatgacatcttcgtctctaattgaagggttcatttcaagtaattttggccattgaacatttaaacgaaggccgatttcaaacaacgtatctcctggctgaatgacgtattcagcatgtaaaggtgcttgtgtttctgctggtatggctgccatttgaattctgccttctcttttaggagcgatttcgcctgcgtcttgcaagtactcaatcagcaattcatcgactgcgctaaattcattgacaatcggtgcattagccaaatccgtgtattcatctccgccagcagcaagaaaatcatttgtagcaagcaaatatgtttcgttttcttgcagcggcttgccttttacgagaacagaatggactctctgtccaggtttattgttgggatcgaactgaaacgaaaacccgctgatttgcggaaaaccgccgctcggttctggatagccactcactccgttttccaaaactttaagcagttgggcacctgtcacttctatggttacggcgtaattgccaaaaggggaaacctcgactaagtcccctttcgttatcattcctgcttgaacggaagcacggatgccgcctccattagtcaaggcaatgtccgcctccgttgcgttacgaagcacatccgcaatgaagttgcctaaattcgtttcttccactcgaacatgctcccgctcgccatttaagtcgacggcagtgtgcccgacaggttcagccaaaatggcttgttgcccctcttctaactctgccagcaatgcctctactttttcgtcaggttcgatcgcctctgcttcactttgctggatcagctttgcgcttttttcaacaaggatgccatctgcaaacaccaaatcgactacgccaaggttttgcaaatattccccggcgcttgcaatgagcgtatcattttctcctgcaagtcctgttggcaactccgagtggctgtgcccgtcaataatcacgtcaatcccttggacttcagccgctactttctgacttgtgtgttcactcgtttcatcaatgcctaaatgggcaagcgccacaatgacatcagcgccttcttgctgtagaagatcgaccattctttgtgcagcagctgatgggtcttcaaacgtaaccgctgcgacattatttggatgtgttttgaaagcagtttccggtgtagctaacccaaaaatgccgaccgttacatcatcgaattcttccagcatgaatggttcaaacaatggctcttcttcatcgttaaggaggttagcagcaatgactggaaaatcaattgtttcctcaagctcatacaatcgatcaagcccataattaaaatcatggtttccaggtacaaaagcatcgtaaccgactgcatttaatacatctgcaatcgttctccctttctcaagagaagcaaacgtcgtcccgtggaacgtatcgcctgcatccactaacagcgagtgctctccgcggttttcagcgatcagcgttttcatttttgcataaccgatgccatctaattccccttcaaatgcacggccatgggcgtcattcgtgtggagaatacggatcgttgtttcctctgcatatgcttcttctgaaaaaagaatgataagtacactaaccacgccaataaagacatttttcttagccattttcgcctcctttttcttctatattagcttacgaaggttaaacttgttttaacttaagtaattttccactaaagtttccataaaaaatcaggaagcatgagcctcctgattacgcttttggcgctttagccgacttgccttcaagcacaaaccggttaatcatttttttgactccatagacagccacaattgttagtacttgtgcggccagtttacgcataagatcccctcctccactttttatttgtatacccggatgatagaaaaaacatgtcgtgtatttctgccagcgaaccgatgcgttcatgattcaagtggtcatccgcccacatttatgagcccactaggccaccgttatcgattttgtaaccatgttaatttggcacgcatcttgcatgattcatcatgaatttaatttttaaggaggaattagccaatgtttaccccttataagcatgaaccatttactgattttacaattgaggcaaacaaacaagaactgcttacagcgattaagcaagtggaggcgaacctaggcggtcattacccattggtcattaatggcgaacgcgttgagacggatgacacgatttcatcttataacccggcgaacaaacaagaattgattggtacgacaggcaaagcgacaaaagcgcatgccgagcaagcgattgaggccgccagcactgcgtttgaatcatggagaacggtagcgcctgcagaacgcgccaatattcttgtccgcgcagcagcaattgtgcgccgccgcaaacatgaatttacggcgctgctcataaaagaagccggaaaaccttggaaagaagccgatgcagacactgctgaaggcattgattttatggaatattatgcccggcaaatggttgaattagccgaaggaaagtctgttcacagccgggaaggcgaactaaaccgctatatttatacaccaactggcgttaccgttgttatttcaccttggaactttgcgtttgcgattatggcaggcacaacggtagctcctcttgtcactggcaataccgtgttgcttaaacctgcaagcacaacaccggtggttgctgctaaatttgtcgaagtgttagaagaagctggcgttccgaaaggggttattaacttcgtccctggaagcggcagtgaagtaggcgattaccttgttgaacatcctaaaaccgcgcttatcacatttacaggttcacgggatgtcggcgtccgcttgtatgaaaaagcggcaatcgtccaagccggacaaaaccatttgaaacgtgtgatcgtggagatgggcgggaaagacacggtcgtcgttgacaatgaagccgatattgacacggcggttgaagcaatcgttatttccgcatttggcttctctggacaaaagtgttcagcgggctcacgcgcagtcatccatgaggacctttatgacgaggttgtcgcaaaagtagtggaaaaaacagaagcgcttaccgttggcaacccggcagatgcgacgaactattatatggggcctgtcattgaccaagcggcatttgacaagattacaggttatattgaaattggcaaatccgaagggaaactagttgctggcggcaaaagcgacgatgcagaaggttacttcattcacccaaccgtttttgccgatgttgatccaaaagcgcggatcatgcaggaagaaattttcggccctgtcttagccattagcaaggcgtcgacatttgctgaagcgctcgaaattgccaacaatacagaatacgggctaactggggctgtaataacaaataaccgcgcaaaaatcgagcaggctaaacaggatttccacgtcggaaacctttactttaaccgtaactgcacaggggcgattgtaggctaccatccattcggtggctttaaaatgtcaggtaccgactcaaaagcaggcggaccagattaccttactctccatatgcaagctaaaaccatttcagaaatgttttaactgctcctttgagagaggttatcgactttgtcaacaaccttagacacaatcttgaacagattgtgtctattttttgtttatacacttttgtctatttagacagttaccgcttacaatttgtagtgttttaatttattgtataacgttgcccgtgaaatgcctaacagttttgcagcagctgatttgttgccatatgttttttctagcgcattgatgatttcgattcgctcgtctttttttggcttgtcttttgaagccaacggcatgtgtttcaatttctgttggtacgattcaggcaaatggtaccaatgaacggacccttcgtggtcgccgttcaaaatcacaattcgttcgattaaatttcgcaattggcgaatgtttccttcccatttctgcgtcctaagcgcgtatagtacttctggatccaatttaggcaccggtttttcatagcgctgggcaaattcctgtaaaaaagattggacgagctcaggtaaatcttctatgcgctctcttaaaggcggaatggaaatggaaatgacatggagacgatagtaaaaatcttcacgaaaacggccttccgcaaccatcttttctaaatcacggttcgttgccgccacaatacggacatcaagcggaatcgcttcatgcccgcctactcggtagtacgctcgttcttccagcacacgcaacagctttacttgcaattcagcaggcatttctccaacttcgtcaagaaatagcgtgcctcctttggctgcatcgagttttccctttttgccacctttagcggcaccagtaaaggcgccttgcacatagccaaataattcgctttcaaataacgctgcaggaatggcgccgcaattaatggcaataaacggtttttctgctctgtcacttgcctggtggatgccctccgcgaacagttccttgccaacgccgctttcgcctgtaattaaaacattcgccgttgtttttgccactttagcggcaagatggatggcccgcctaatcggttcactgcgcccgatgattttctgaaaaggttcatcttcgctagtcgtattcaaatgatgcaaagacgcggttttagacgataattcttcatttaagcgaaccacatctgtaatgtcccgttcgatcgagaggccgccgacgcacgcttctccttcaaatactggaaccgtattcactatgacatgcaagccaggcttcggctggttgtattgatggacgactggttgtttatctttcataacggaccaaagcacgagcgcttcctcatcaaagtaatcgcgcaaaggcttgccggcaatagcacagcttgttaacgcatacaattgttctgatttggcgttaatttggataatccgctgttcttcatcaaccatggtgactgcgtcatccatcgcttccatcattgtttgtaaaaaggcatttgtgcgctttagctcttccagcaaaacattggccaacacttgttttttgacaatcccaaccacgttgttcatgtgatctaccgtataaatgtcttttggttctaacaacggcggcaactgtgcaatcaatgtgtcttcaggcagccgccactcgctgttttttggttgatcggcaattggcaccgccacatctttaagagatctacgcaacagagtcacactcctttacggatttatccgttatacacaattgtcttattgtcttttattttagacgaacctggccaataaacaatctttttttcttcgcgtatttttcattattggcacatttcttgcattgttattagcaacttcacatttcaataggaggaatcatcgatggttctagatcaaccgcttcgttcattctttatgcagcttgctaaaagcaaaccattaaataaagcagctaaaaaatggggattaaaatttggcgcgcggcaattcgtcgctggacaaacactggaagaagcgatggccacagttattgatttaaataacaaaggcctagtttgtacattagaccatttaggcgaattcgtcaccgaagaacaagaagcgcttgactcaacagaagcatgcttagacgtcctacgcgccattaatgaaacaggggctgactgcaacctttccctcaaactgacgcagcttggccttgatattgatgaatcgttctgcctcaaaaacatgaaacggattgtccagacggcacgtagcttcggaattttcgtccgaatcgatatggaggattatgcgcactgcgaacaaactttgcgtattttagagaaactcaggaatgaatacgacggcgttggcactgtcatccaagcttacttgcaccgagcagaagaagacgtccgctcgttaaaaggcgttcctctccgcctcgttaaaggggcttacaaagaatcagcagaagtggcattacaagaaaaggcccttatcgatgaaaactatttcaacattattcgtcttcaccttgataacggttcgtatacggcgattgccagccacgaccaccatattattgaaaaagttaaaacgtatgcggcggaaaaccgcattcctaaaagtcagtttgaatttcaaatgctttatggttttcgcgaaacgctacaaaaggaactgctcgaacaaggctacaaagtccggttatacgtgccttttggaaccgattggttcggttacttcatgcgccgccttgccgaacgtccgcaaaatattgcctttgttttgcgggggttcttttcaaaatgacttaagcctccaagaaagaggacaccctttcttggaggcccttctcttagtggcaagcacctaaccagctaacgtgctattattttttgttaacaccctaacgcgaaatggtgcagcgtaatttcagggcggcttccaaggcggatatttaaccctgtttgtcctaaaccttcactaatataaaacggttgtcctttatggtgatgcaacccttttaccattttcaaacgtactaattttcccattttcacaaggtgataaggctttggccaatggatttgcccgccatgaaaatgaccagcaagcaaataatcaaacgagacatgatccatatcaaggacaatgttcggatcatgggtcaatacgaggttatatccattggctacgccattaaatgctttgtctatatcctctcggttagatccagcatcatcaatgccgataatatttaaccgtttcccgtcgatcatgatcgcctcattttcgttttgcatcgtcttacaaccatgcttttctaatacttccttcagggcttgaaaatcagggttcttcaaccaataatcgtgattgccaaatacagcatacatcccatagagcggccttaatcggctgaacatcttcaagtatggaatcattttcggaatgcttttcttgcggtctgcgaagtcacccgttaaagcaattaagtctatccgcttatggcgcaatttttcataaagctggtcaggagtgacggaaatccgttcaagatgcatatcagaaatatgcaggacgcataaggaatggttagcctcccgatccgactcagatgcagaaaccgtgttgactacaaaatgttgcgtgtttttgtagcctctataaaaaagcaaaataaccaatatcgctaatagtgtaaaaataatcacggaacgtcctcctctatacatcaagtatagaaaatttaacgacgcgttgttacctgcaattattggcatggcccccataatcgcccaacaaaacaaccttctcattttccagtgaataataggcaaacaatcatcacatcctaccagtaccaagattaggagggataattgatgaatcgtatcaaacagttttctgctatttgtctcataggcctcgtcttaacgggttgtggcatggctcaaaacaacaatgatcgtgaccagcaagtggacgacaatgacaacagagaaacagaaacacgccaacaagggtatgatgataacgccgggccggtagaagatcgcctagaggtcgctgatgaaacagctgaacgcgtggccgaactcgatgaagtggaaagggctaacgttcttattgctggggataatgcctatgttgctgtgatgatgaccgatcgcggcgaagatgaagtcacagaggagttaaaagagaaaatcgctgaacaagttaggaaaacagatgaaaatatgaacaatgtctatgtctcttcaaaccctgactttgttgaacgagcaagggattatacagaccgcataaataatggagagcctgtgaaagggtttgttgacgagtttaatgaaaccattcgacgaatctttccaaatgcaaagtaatacgtttaacaacacaaccggcgtttcctgttgagatgccggttgtctttcttcccttaacgatttaaaggagtgcgctcgtatgaagaaaaagctcttatttgtgtttttaatcgtgttcttgctagctgccgtttcgatcattggattacacactcccgccaaaaacatcaatcagcaccatgctagcaacaagcaaggcaaacctgtcatcctcttattggttgattcgctcatggacgagccattgcaaaaagcagtggcggacggaaatgctccagcttttgagtttctcatcaacaatggccgttactacactgatttggttagttcgtatccaacaatgtctgtgaccattgacagcactttgcttacagggacgtatgcaaacggtcatcgcattcccggtttggcctggtttaaaacagatgaaaatcgccttgttaattatggcagcggcttaaatgaaatcatcgcccttggcgtcaagcaagtcacaactgatagcatgcttcatttaaaccaaaagcatttaaacaaacagacggcaacgatttatgaagaactagcttcccgcaacctcaaagcagcatctcttaatggtttaatttatcgaggcccaaagccgcacacattaacgacacctaatggagcagcgtggctaaatatgctgccgaaaacgattcaaacacaagggccatcgttgttgtcaatgggggcgttttcccattttagtccgaaaaacgatcttcagttatggaaatcagctggattaacagatacagcgaccgcaaatgagttagtctatcttatcgagcaaaaccaactgcctgcttttacgctcgcttacttccctgaattggataaacaagtccacaaacacggctcgatggcagtgaaaggcattgtacaagttgacaaagagctgcaaacgattttaaacacgtatcgatcttgggaagaagcaatggaacaagcgatctggattgtttgtggggatagtggtcaagccgatattttggctgatgggcaaacagcagaaattgacattaatcagctattgtctcagtttaccgtttggaatgctggtgaagaggcgtctccagcatcttttcaaatcgttcctgcccttaacgcgcgcatgacttatttgcatttgcttgatgagcaactttcctacttagaagtagcagcaaaattaacagccgactcacgaatcggctttgttgcctggagcgaaaatggcatcaattatgtctcttctccaaagtcaaacgagctgtttaccttttctcccaacggcgactatacagacccttaccaacaaacttggtcgatcgatggggatgagacaattttaggtcttacaacaaatgaccaaaatgacatacagttcgatgactaccccgatgccctggcaaggctccacggcgccctccattcacacgatggccgctttttaattgcagatgctcttccaggctatgaatttatcgcaaagcatacaccaaaacattcaggcggagcaggccatggttctttgcataagcttgactcaaccatcccattaatcattgccggcaccagcattgaacccgactataggcggcttgtagacttcaaacagtgggtcgaggcattaacagattcgcaaagcaaaaggattgagtgatcactgcttagatggacgttggaacaaggacaaaatcaccaatcgctggccaacggttcgcaatcatttgatcgttcttaaatcggcagcaaaaaaagcggcaaaaagggataacaacaaaattgtgccaaatgttaagacgtcacgagtgccactgctcactacttctataagtacgacaccacttattaacatgcaaaagaaactagccaaataattggactttattgtgtgtctaccaaatacagcgacaataaaagcaatgacacttatcgaggcaatgattagtattcctatagtagccactaatacatcattcctttaaaagttgggtacctaaaaacatacgatactgtcgcagttaacaataacaatggaaaaacgatcactcaaccatttagacagtttaagagttattacgacaaatatagttttcattcggcaaatgagttaaccaccttatcaagagaaaacaaaaaactcctccttacctctatagcaaaaaagctggcgacagagcgccagctttcttgcttaatgatggagaaaacctaaatagacgataaacacgacaaacagtaaatacataagtgggtggagttcttttcctcgcccttttactaccatcgtaatcgggtaaagcacaaacccaagagcaataccagtggcaatgctgtacgtaagcggcatggtgacaactgtgaagaagacagggatcgctatctccattttgttccaatcgataaaacgcaatgatgtcgccatcatgacgccaacgataattaatgccggagcagtcacatggcctgtaatgatgctaagcaacggcgagaaaaacagagcgacgacaaacagcaatcctgtaaaaatagccgttagccctgtgcgccctccgacagcaacgcctgatgtggattcgacgtaagcagttgttgtcgatgtcccgagcaatgagccaatggtcgtagcgctcgcatcggcaaacaacgctctgcccgcacgtggaagtttgttgttctttacaaagcctgcttgagtggcaacggcaaataaagtgcctgctgtatcgaaaaagacaacgaataagagcgttaacacaacaccaaccatttgcacagtaaacacttcattttgccaatctacttggaatgcttgtaaaaacgtcggtgcgatgcttggcggagcactaacgacgcctgttaatgtcgtaaaaccagtaatgacaccgacgattgcagtaatcgccaacccatagaacaccgcacccttaaagccgaggacgacaaaaataatcgtaacgacaatcccaaaaacagcaagcaaagggccaggagctgacaaatcgccaagcgccacaaaggtggcggggtcgcttacgataatctctgcatttttaaagccaataaaggcaataaacaacccaatccctgcaccggctgcgtattttaattcttctggaatcgcatcaatgattttttcacggattttaaaaacggtgatgccaaggaaaatgacacctgagaaaaatacggcaagaagcgcagcctgccaagataagcccatgccaatgacagcagaaaaagcaaaaaaggcattcagtcccattccaggtgcaagggcgattgggtaattggcaacgagccccataatgatagaaccagtcattgctgcaagtgctgtcgcaacaaacactgccccaacgttcattcccgctgccccaagaatatcagggttgacaaacaagatgtacgccatcgcaagaaacgtggtgaacccagctagcagttcttgcttaacagacgtcccattctctgtaagcttaaaaaaacgatccatctttttcttcctcctaacgcaaaataaccccagggatcttctacctgaggctgacacaaacggcgcaacgatgttgcgctccatttatcatgccgtagtcaagccatttacggtggctcggtagaaacgtgcaggccttattcctgcaattatacgggtattttcctattggacattgttagtgtagcaatggttgggaaacgtgtcaatataaaaaaacgaacaatgggaagtatagccctcccattattcgtcttcaactttgttggcttcattcctaaaatctagtatactaacaacacgatttaatgaggaggattgacatcgatgtatgcctgtaaagtcacttgcaggacaacgctttaccacgatttcggcaatggcactcctaacctcgcctctacaaaagcgctgttccacgcccattatcaaaaccctgtgtctgattgcctccgtgttacggatctctcaaactataaacattggaaaaaccaattcaacgaagtcgcggccactgcactcgtagaagtgcttgtcccctatgagcgtcatgtcgatttcatcgaagactatgaatcactggcttgccgcctatcacgccgccttcttcctattaaaggggcagcgatacaagttattgaaagcgaatggctcactcccaatcgtagcgaaggattttatcgagaaagccagcctaaaaagaaaatctaggagagggcacactcatggcatatgtagatttccatcaaaatgagtaaggaggtggcagctaaaaaaacatatctgccttttgccgataccaactagggatgatttccgtaaaatcatgatgatcattcaccacgtcaagagagtaggccaatagcgtgtcatactgttcttcgctagtccgctttccccaaacgatggcagacactatatgcatcgcgctatacagggcataaagttgccaaaaacgctctcctggtttttcaccgttatggtagccgtcaatggcaccaatggaaaagggaatgcttactcgaatggaaaaaaagccaagtttttgcaagtcatgaagcggatcgccaaagtcgaagcggccaaaatcaaccaaaccgacaaaacggttacggtcaataatcatattcgccggatgaaagtcatcgtgttggaaacgattcggacgccctttcagcaaccattcattttctccaatatagcctgttaacaactgtttaagggcagggtcaagctcttctattttttctagcgctgacaaatagcggtcgctcttttgttttttggctatttcccaagaaggccagtcctgatccgcttctatttcatgcagcttagccagctcttgccccgccacaaaaccgatttggtattgctccttttcagacagcgccggcagtgcttcttcaccatcttttcccggcatgtaagtcagcaccatatacgctttgccatcagctggcaagtggccaaatgccaatgccttggggacgaaatcagaatgggcggcacatgtttgaactagttcaaattcttttttacgccattctgcttccgttaacggaaatagccggactagataggtttcatcaagtacatatttttcatcattggaaaaccctttgacgagctggcggatagacttagccccagcgacgtacggaattccttctaaagtgtttttaaacaaatgaccgcctccttttctaaacgaaaacaacttagcaatgacctaccttgcttgttgccccgtttgctcgtttgttgtttgatcttcaaaaaatggtcgattgcctggtcggaaaacggaaatcgcaaataaacaggcgaggacagccatcgcaagggcgagcaccacaatggttagccgtaaggaaaaccaatcagccatcacgcccaccgctaaaataaaaagaatttgaaaaatgctttggcctaattgcatcatgcttgtaactcgccccatcatttttactggaatgtggttttgataaaaagtcgccattccagcgttcacaaatacgttaaacaagccgagaacgataaagccagcggcaatggaccaaaacgaccaagaaaacgcgtacatgaggtaacctgctgtcattaaaaggagcccactgccaatcatatgccgcaacggaatatgattggcaaacaacgccaaaacggcggcgccaacaatcgaaccgatcccggtaatactaacaagcaaactatattcaacttgcgataaaccaacaacttgctgtgtaaagacaacttcttgcgtatccatggcaaacgaaaacaacataactagcaaaaaaacaacgtaaatgaatgtaatatattggtggtttcgcaaaaacgcggcgacagcagtaaaatctttagcaacttgtgcaaccgttaattttggaaccgttgcttggttgattttctctgcctttggcaatagtgcaaggaaaatagcagcaacgacaaaaaacaaagcatttgcccaaagtgtccaggaaatagaggttgctagaatcatagcgccgccaatcgcaggaccgacaataaacgcactcgatgaacaaaacgagcgaatggcgttaaagcgcttccgcttttcaacaggaacgagcatggtcgtatacgtcatcgaagctggcgtaaaaaaagattgggccacacttaaacaaacaagaatcgaataaataatagcgatgttgggggctaaaggaagcaaagcaataaaagcggccctaagtccgtatgtcaccatcattactgcccgtttgcttcggtaatcaataaaactccccgtccaaaacttcgtgcaaatgttcacaattgggctaacaatccacaacccggctacggcggcagccgaaccagtcatgtcaaagacaataatattaatcaccactaaataaacaaaatcaccaatgttggcaataccgatcgaagcaagcaaaatcgctaacttgcgccactcttttttcttttccatccttcccccctgctttgccctctataggaaagaataccgaagaaagaacattcacgcaaccatctttttacaaacaaaagccaacccgaataggttggctaatatgcgttatgcttcgttatcagggttggcgcgtctgtcagcagcggcagcccgttgttgagcctctatatcgtcttggtccgcaagttcggcggaatattcttcgtcaattccatcacttatgatttcctgttttggcgtttgcgacaatttagctttgtctttatgtttattattacgagactgtcctcttgtcatttcaccatcactcctttgttccataacatttccattcaaattgctttctatgcatatttaaaaagaaacagaagagtgacccgctcgtttttacagaaatgacagttggtttactcccctttctggtagctgctttctgcattcctttttacttcatcgatcccttttccaagccctgcatgaatcgtcgccacatatcctccttcgattaaaggtgcgtcgctaatcatgatcgttcggttcggctcaaactcttgtgccatttccgcattcattttcgcacttcctatatcgtagaaaaccaaaatatcatgatcacttggtattctgtctataactgtgcgaatccgttcgatgcttgtgccgatctctccgtcttccaaaccgccacaagcataaataccaacatcacggtttgcttgttgcatcaatgcttgggcgccgtccgccagtgcttccacatgggaaataagcaaaatcgctacacgtctgtctgccatacatcactcacctgccttcattgtgttgcatagcgttttaaacaaataatagcttgagactgccccaggatcgatatggcctactgactgctcgcctaaaatcgcgccccggccacgtttgacgaccatatccttcgttgcttccatcccttctctagcagccgcttccaactggttccaatccatgccggtttcctttgcttcattcgccaccgtggaccaaacatcaagaagtgtcccttctcctggcgcggcctttccgcgctgggcgatgccttcagctgcttgtttgagagcaaccaccatcgtctcatcatcaagtgtctgttttcctttgcatgcagcggacatacgtaaaaacgcggtaccgtataaaggtcctgacgctcctcctacttttgaaatgagaatggtagcgactgtttgcagtaatgccgccggctcatcctcctcctttatgtttggcagctcggaaagcactgcttgaaagccgcgatgcatgttaatgccatgatccccatcccctaatgcttggtctaatttcgacaattcgtctctgttgtccgcaataacagccgccagttctgttaaccattgtttaagctgtgttgtattcataccggttcctcctctgtcaaaatgatcgcccattgtttcaaaaacgagttgcttacgattgccattgcacggtccttgcctctgcttgtaagtaaggcgctaactcgtcatcgacaacaaacaacgtcaaggaaatgcctgccatatcaaggcttgtcatataatcccctacataggtggcatgtattttataggactgcttatctagttcagctagcacgtcacgagcaaaactgtactgctctactaacggcgtgctgcccatgccgttaataaggacagctagtggatcagagccaggcaattcagcggccactttcgacacgagcagtttggcaatttcttgcgatggagcgactttttctcgatacatccctctttcaccatgtatgccaatgccgacttccatctcgtcttctgccaaagcaaagctaggttggtcaacgccaggcaatgaacaaggcgttaaagccacactcatgctgcggatacggcttatcgctttttcagcgacttcctttactttcgttaaactagcgcccgtttctgcacacgctcctgcaattttatggacaagaaccgtgccagcgatgccacgccgttgtgctggatcagccacagctacatcatcgttaacgaccaccatttctgtctgaataccttgtgcctcggccatttccattgccatctctgcattcattcgatcgccgttgtaattttttatgacaagaagcacaccttttccttggttggctgcttcaatcgccgctaaaaattgatcagcgcctggcgaagtaaagacttcaccgcatacggcagcatcgagcatcccttgaccaacataacctgcatgagcaggctcatggccactgccccctccgctaataacaccgactttatccgtttttggctgcttacggacaaccacattgctatttcgaaggcgttttaattgactcgtatgaacagcagtaaacccatctaggaaatcggacactaactgattcggatcgttcaacaattttttcatttttatattcccctctccttaatgagcaaatcgatgcttatcatataattattcgcatacatctatattccctgccgcgccaatcagtaatcaaatgatctgtgacagtttttctaatcccttaattgcgaaatgccttaaagatctcagcgaacaatcatatgaacatttgtttcacatttttaagagtcgtttgattgtataatctgtataaaagtatataagcaaaaacggttaagaaaggatgatgacaactgagcaactacgcgaataaacaagctttgattgatgaaataatgaaaagagcaacgttattcatgaatgaatttcatgctattgatgatcttgataaagatgtattcgtaaaagaagtggaccgaacgccagcccagatgattgcctaccaattaggctggatcaacttaattctctcttgggaacaagataataaggatggaaagcacgtcataacaccaacggaaaattataaatggaataaccttggtggcctttatcaacgtttttacgacaaatacgcagcgtgttcccttgaaacattaattgacctgtttcaacaagatgtttataaaatcgttcaattagttgagagctatagcgaccaagaattatttgaaccaggtggtagacaatgggcgacttctacgccagccaattggcccatttggaaatggattcatatcaatacagtggctccatttaaaagctttcgaacgaaaattagaaagtggaaaaagatgaaagggctataattgctcagacgtcaaggatgatttcccacaccactttcttctcgttctctaaaatatgtcccactaccttctgctaaaaagacaatataatcatactaaatgatttctattcgcctttttcacattacccttttacggaaaatcgcggccccccctcagttcaatcccgtttgaaattgcaaaaaaccatttcttcgcaataacggaagaaatggttttttattttgtgctttatacgattcttattggtttctttctttcaattcgataaatctatgtgcaatgttttctggtgtgaagcctaatttttcagccaattcctgcccgtttcctgaatctccaaacgtattaatcgttattgtgtctcctttagggccaatatactctctccatccaatatcagaccccatctcaacagctagcttattatcaaggtttgatggtaaaacactatttttgtagtcttcattttgttggttaaacaattcccaactaggcatacttacgacattcacaaatatatttttactttccaaaatcttctgtgcctttattgccaattccacctcagatccagtcgcaataataatacctgtcgcctcttccgctccttcagaaatgagatatcctcctttttggaccccttctaaagaagcattgtctaatacgggaacgtcgtgcctcccaagtataatcgcagttggtgtttttttagaattcgctgcgataagccaggcagctttcgtctcattcgcgtctgccggacgaatcacatttaagttcggcatagcccttaagctaatcagatgttcaattggttgatgtgtaggcccatctggtcctagcatgatgctatcatgcgtaaacacataagttactggaactttcataatagcggacattctaatggccgatctcatataatccgagaatacgaggaatgtaccacaatatccttttattccaccatgcaatgcaatcccattaataatcgcagccattccaaattcccgaacgccaaaatgaatatttgatccacgatagtcttcctttgtcataaactcattatcacgaagggttgttttatttgatgaagctaagtctgctgaaccaccgataatggacggcactttagaagcaatctcatttaatacggtacctgacgctgatcttgtcgctactttttcttccgtgaactccgttgataattcatttatttctatttcattttccatgctacgaataaattcagtagccaatgctgggtacttctgttggtattgcttgaataattcgttccatttattttcattatccaaaccattcgaaaggacttgcgaaaaatcttcttttaccttatctgggatgtgaaatggatcctcaaaacgccatccgtattgctgcttaatgagttgagcttctttttcaccaactggattgctatgaatatgttcagttccacttaagtttggagaaccgtagccaataacggttttaacttcaattaaggtcggtttattcgtttcttttttacctaattcgatcgcttgttgtattttttcaaggtcatttccatcttccaccaaaatcgtctgccagcccattgttttatacttttcttgtacattttccgtgttgctatcagtaacagagccatctgaacatatatcgttagaatcatataaaacgatcaacttgccaagccctaaatgacctgcaagcgacatggcttcttgccctacaccttccattaaatcgccatcaccacagattgtatacgtgtaatgatcgacgatgtttagatcgtctttattatatttagcagctagatggcgttctgcgattgccatccccacaaccatcggcagaccttggcctaatggcccagttgttgcctctacgccaggagtataaccaacttccggatgacccggtgtcttactgccaagctttctaaagttttgtaaatccgatagggagacatcatatccagtaagatgcaataaagtatattgcagaatcgatccgtgccctgacgataaaacaaatcgatctcgatcataccactttggatttttaggattatgcttcaacacatttctatacaatgcatatgccatcggagcagctccaagcggcattcccaaatgcccatgttgagcatattcgacactatcgatagacaatgttctcactgtagtgactgataattctgatatgttttcttttgttaatggcttcatgattgaacatcctcctagtaacattagaataaatttatgagaaattggccaatgtaatacaccagtacccctacaatcgtaaaatcagtctctgggaatgctgtcccggttaaaccgatatccgccataattggataaataatcgcaggaccgattgcaatgagaataccgacgacaaagctacctgccaatgcacccttccaacctcctgaggcatttccaaaaacgcctgctgtggcaccaataaagaagtacggaacggcgacagggatgatgacagatagatcaaatacaccaaacataaccatacatagtagtccaccagcataggcagataagaatccaatgactgtagctgtaggagcgaatggaaatacaactgggcaatctaatgccggtttcgcattcggtattagtttttctgatattcctacaaaagcattcacaatttcgccaagcaacattctcacgccagtgatgatgacataaagcgctgcggcaaatgtcagaccttgaatcaatggatagactaaccaattcatgccacctgataaatcctccacaaaatttgggcctgccgcaaaggtagcaatatagtaaaatacaatcattgtcaagctgacacctacaacataatccttaaacatcgataaccatttaggtaatttcaagttttctgtcgtatcttcaggctttcctacctttgacccaacccatccagaaatggcataaccgactgttacgtagtggcctaatgcaatctcatcattacccgtcacttttctcatataaggttgagcgatggcagggaaaatacaagctgaaaaccctaatattattccgccaacaataacgatagctgtattccctacatctaatgcttttagcatgacggtcagtagtgcagctaaatagagattatgttgccccgttaaaaatatatacttaaatggcgtgatacgggcaaatagtaagttgaacgcaaaccctactagcataacgagagagacaactgttccaaacctgtcttgtgcaagtgcagtgactgcttctgctaatgggagcaccccgtttaaaccaaatccttcactaaataagccttgaaagctatctaatgcgagaacagctgcccccgaaccgaccgaaaatattaaaaatcctacaatcgtcttaagggttccagatacaatatcatcccatggtttcttttgtaaaaccaatccgataaaggccattaaccctactaaaatagctgccgttccaagtaaatctataacaaacgctttaataaactccatattgctcccccctgtttattattttgacgcatgcattatttcgtatcctccataaacttttctaacttccttttaatttcttccttatccatcaaatttttaattccaatcacatacttcactttatctttaacatccggtattaaatcctctatcgtaattaataaatccccattaaattgattcactgcgcttaatgtgtcatggctaacttttattggatacttgttctctcttacaacttgatccaccttgatttttaacatcatactgcttcccattcctgtacgacatactaccaatgcttccttcatgataaactcatctcctcttcatatttttctatgaaatttatgatttcactaggttcttttgccttttccaatgtttcgtaaaaggcacggtcacctaacagtccaactaactctgataacgcatttaaatgcgttatattgtctaatgcacttaaacaaaacacatacttcaccgggtcattttcgctatttccaaattcaaccggtttttttaaagtagttatgctaattgctaactcattcgccccgtcttcaggcctggcatgtggcaatgccacatgctttgtaatcacaatatatggaccgctttcttctgcactgtcaatcatggcttttacatatccttctgtaattttgtgatgattaactaaagaggtcgcactttttttaatcgcatctttccaatcaaccgcctcaacattcagttgaattaactctttagtgacaatttcacttagcatcggttgtctcccttcaataccatcaacatatgaataatttaagattagattatttaactcttcttttaattctgacggccttttaactacagcatgtttgataatgacttttagtaaatcttccacatagtaattttcagtaacaacggtcttccctattttccgataaaaatttttaatcaaagtcgctttttctaaattattcataatagggcttacgacaagaataggctgtgttgccttaattaattttgtagaaaaaataatatctatatcatctcttaaactatctaatttactgattggaatcggtttcaaaaaatacactttaggaaaaatattttttaattccttgtataacaataaagaaatccctgttccatttggacagacaatcgctgcctttatcattttcgtactatttacagttgttacatctatatcaattaaagtcgcgaagtgaattgtcaaataggcgatctcatcatcagaaaccgttatattattcggtaaatttagcggttcgagtatatcctttaatagtttaaataaagcattgtactgctttttgattttatcttttaatggattgacaatcggatattgaaatatgattcgataataggctggtctgaaatgcgcatatacttgctctaaaacttcctccttactatttagctgaatcccatacgaaacttctaattttatcattattttttcaatgatctttttaagcattggataatctggtgtgtttaaataagaatccccaattgaaaacgctaacaataatgacgttaaaaattcaatatgttcattgtgagccatacctaatttatccagaatttctcctgctacagcatattcgttatggccttcaaaaacaaagttgttttcttgtaaaaagtcttctttgattccccggcctctcattaaaataaaggtggcgatatacgtaacttttaatagatcattatctgaaaaatgaatattagctttgtaaaaacaggttttacagacagaagttagtttgttaaataacgatagtccctgttcttccataattaaatgaaaaatgtagtggctacgattatcatcaattagcttcgttattaataacagagcaacatacttaatcgtactttcttccccttcaatgtgatatcctctcaaccttgaataagacagctttaatgaataatcttctaactgattggctagcttctttaaatcatcatttatcgtacctcgacttacatccaacatttctgtgaaatgaaataaggatatttcctctctacttacatataaataaagataaatagccatcaatcgttcgtcttcattcagtatatatttcacattttccttcaaaagggctttgagtacttcatttgtatcattttgaaaaagaaagccttcttttccttgtttttttatttctttaaatttattttgtaagagccaatcattaattcgcgttagatcgtagttaatctgtctcctcgttaataacgtttttacctctaaatctttcatggtaatattatgatttcccattattaattctaggatgttaagggatctttgctgcagcataagcattcctcctcctacttattacattatatcgaagcgcttacatattcaatcacatttgcgttcagtttttgttcgctttataaccaaggattatactcacagatcacaaaccttatcattaaggtaaattagattcaattaataacaggaactctgaatgttgcgttacctctattctaactgaggttattaaaactggctccttgtaattttaggaaaccaatttcatgtaattatatagacttaactctgaaagctttccattggtaacaattaatatgattttacatttattaaaaagaggaaaaggcggaaacgctatgggcgcctataaaaattgtacttactcttgccccagtggtttcttcagtactcggaggattattaggagaggtcaaaaaggaaaatatttaataatgtgtatataaccaatctgtttttcatgccagcattgattctcatttttggcgtttgttgtttttgtatggcgtcactattggttttgcgccattgttattttcgaccatgatcagtaataaagctctacagtatagagactctgcattaggttttatggaggtagatagttgtgcatatggaactgacaatctaatttgaacgctaaaaaaacatttcaataaatctacttcttactgaaaaatccgcaatcattactacaagcctcttttgctcatttcctctaatatgtgattaatgatgttagtttgtaggtaatgaaccatcaatgacaatgtcagaattaggtttaactgtcctttccatttctaaataagctgtccttccacgtgataaataattcgttaaatcatttctgacatcatcaatgggactttcactaaaatcccttagtattcgtctcgccattgcaatatctaaaggagtatcaatgtatatagaaaaatcaatatattcacccattctattgtgcaaataggcaaaaggataatcaagtaaaatataattaagggattgagtgtgttcattaataaggagtttgatatcctggattaatggtgtcagattccattcattataatctgctccttcatcgacccatttacaaatatcctctggacactcttcaaattcatagtcatcaaaatacagaggtatcgatttatttagatgttttagcaactgatttgtgatcgtggtttttcctcctccagaaacagccgcaattgaaatcactcgtggtttacgattcataataaacctccaacaggaattttatgtatcaaacttagcatattttgaatgatccttggtttataaaatcgttttttccctccagtttcttcattttgggagtcgctttggaagcgggacagagtttaaaaaaatgattctacttcttgaacttaatttctgctatcttccgaaccgtataaacgacacaaaaaatgtatagaaataaaattatgtcaagacaaatgcggtaaaaactataattgagggtatcgccatttcaaattgatctggcataaacaatatctccgtctgcaaatatgtcttgaattcctcttaataaatacagtaaactctaagtcaagaggttctctaacccgcctttaaactaggttcaacccttataatcaacagtttaagccagtaatatggatatgaaagacggataaagattagagttcactttaatagtaggaggagaaagagatgtccacgattaaagaaatttcggagaaaaccgggattaccccctatactctccgtttttatgaacgggaaggaatcctgccttccgtcaagcgcgattcaagtggcaatcgaatgtacgacgaagagagtatggactggttgaatttcattttggcgcttcgggcgacgggcatgccgcttgccgagatcaggcaatatgtggatttgtaccatgaaggcaagagcacgcttaagatacgtaaacaaatgatgctaaagcataaggaaaaagtggagaaggacctttcggaaacgattaaatatttggagcaaatcaattacaagctagcgttatacgatatgcaggaaaaaggattgaccaagatgctgccctagatcaaccgttttgcaccctctctttctaattggagcgcgttcgccatcaggagaacgcgtcttttttggtgcatctattagagttaactataatacattccgtctaatttaccccatatatttacatttattatttcgatttatatgaataaccatggatttacgggattttcagcctacacaaattatttatttgtcagagcttgacttacagtaaactcaaattgataacctagaatcaagccagcgatgaatggctaataatagaacaaaggggaaatacagatgaatacaaaagtagcaatcatcacaggtgcaagcagcggaatgggagcggctacggccaagcttctcgctcaacatgacatgaaaatcatgcttgccgctcgccgggaagaccgattgcagcagctgcaagacgaaatccgaagcgctggaggcgaagccagctacaaggtgactgacgttacttcgcgtaccgatgttgaagctttggcagatgagaccataacaacctatggacaaatcgacatcatgattaataatgctgggatcatgccactttcgttcttcagaaatttgaaggttgacgaatgggagcgaatgatcgatgtgaatattaagggcgtcctctatgggatggcagcggtgtacaagcatatggaagaacgcaatgagggacatattattaatttctcgtccattgcggggcatatcaccttcccttcaagctctatttatagcgcgaccaagcacgccgtacgggtattaactgagggcatgagaaccgaactgggggccaaacaaaatattcggacgaccctcatctctcctggagcggtggaaaccgagctgtacgatactattacagataactcgatttatccggcgttggagaaattgggcagtcaggaatggaaccaacttgaccctaacgacattgccaacaccatattgtttgcaatccagcaaccgactaacgtgacgattaacgaactgattgtccgccctacgtcgcaaagcttgtaaaattgtcgccgcacaactttataaatgtaatgcggctctattgttaaaaaagtcgattccttatcgtacagggaatcgacttttaaatatatacgatttttaatggtggggatgagttatcattattttgaacatctctccgttccagtcgagttacttcaggaatttgatctcacgggaagttagattcttggcgacaaaacctacggctcagaaacggtttcgaaaaaaaatataagtaacggagccaagactaacctaaaacgattaaaatcttaactccctccaaactaaaaagctaactattcacttctccaaaaacttcatccatcatatcatccataatatacgccttaaactcgtcgttctctaaaatcttcataaagaactcttgattgctgctcattcgatcaataacgaagttcataaaggatttttcaaaggcgaatttgaagttttcttttgtgttgttttttgctttttggcgtatgtctttgtcatttaacatatcctctttgacttgctcacgagaaaggaaatctgtttctgtgaattgcgtgccaaaacgctcatttaacttttctaacacgcttgataatcgagccttttcatcctcagctgcaccgccagtaccatgcttctgtggatcaagttcaacgccacccattttttccagctcgatgctaccttcgaataccttttgattgcggtagtattccagtgcgatatcatctgctaaatacacatccttgtcaccagagccacggggtagtttgcgcaacaagtatgttaaataaatatattgcttgtgtaaacctacatcgatgaacgttacaacttgtagtacaaaactataagtacgtgtgaattttgttgaggctagtttaaaatcaagctgttcttcttctgaaagttttttatatcgctcgacacctttgtcaagaactgcatttaactctgtttgccccttagttgacttcttcacaccgcctgttacttcaagctcattaaccttttgtacctcatcttctgtaaatacttgatatggctcaatttcagcctgcatatcataaagaatatttgggtccgtaatttcagataggcttgttgattcgtaatatggttggaatgaagctttcatatcctcagggtcatttacaaaatcgagtacgaatgtgtcctctttacctgggcatgtacggtttaaacgagacagtgtttgtacagctttaataccgcttaatggcttgtctacatacattgtgtgcaacagtggttcatcaaatccagtttgatatttctccgccacaagtagcactttgtattcatcagagttaaatttatcaggcaactccttttcagagaactgattcatttctgactcgatataattaatctcaccatctttcacagtaccagagaaagcgactaccgtttttaaatcatcgtagcccatttcattaatatacttatcgaatgccattttgtaacgtactgcatgtaaacgactcgctgttacaaccattgcctttgcacggccaccaattttgcgctgaacgaaattgcgataatgctcgataataatttctgttttttgtgtgatgctatgtggatgaagtgacacgtattgtgctagctttttagtagcttgtttctttgatacctctggatcatcctcaactgtctttgcaattttccagaacgttttataggtcgtataattttcaagtacgtctaaaataaagccttcttcaatcgcttggcgcattgtatattgatggaaggcctctggtttaccatcaataccaactgtaccaaatttctctaatgtcttaggctttggtgtcgccgtaaacgcaaagaacgatacgttatattgcttaccacttttcataattgcttcaacgattttttcgtccacatcatctaagttttcttccacaatgcggtcctcctcataagctgcttctaacgttttatccgataacacattcgttaaggctgtggaagcttttccgccttgggatgagtgcgcctcatcaataataaccgcatactttttacgctctaagcccgctaccttttctaaaatgaacgggaacttttgaagcgtcgtaataataattcgagtctcattattaatggcacgtgctaattgctctgaatctttatcaatcggctcgaccatccctgctttatgctctagctgatacaccgcatcttgcaattgcttatctaacactcgacgatcggtaataacaatcacactactaaaaattgattcattgtcctcgttatgtagtttcgctaaacggtgtgcaagccacgaaatggagttcgtcttgcccgatcccgcagagtgctgaattaaataattatgaccgacaagcttttgtgcaacatctgcttctaacttacgtacaacatcaagctgatggaaacggggaaaaatgagcattttacgctcacctattgtttcaccgtttgaatctttaatgtcgtctttcttaataaagatgaagcgatataaaatgtcgagcaagctatctggagataaaatttcttcccataaataatgcgtacgataattgtcaccataagttaacggattgcctttcccaccattattgcctttgttaaatggtaggaagtatgttttgtatttatcgagtttcgttgtcataaacacttcatctggatcaaccgcaaagtaaaccgctactcgctcattaaacttaaatagttgctcacgtggatcacggtcatcctttaactgcttcatcgcatgctctacagtttgattcgttaggggatttttcagctccatcacaacaagtggcaaaccgtttaaaaacagcaccatatctaagctattgttatgcttatcactgtaatacacttggcgagcaacgttaaagcggtttttcctatactgctcaattaatgttttattcatatccgtaggtggcttattatacgcaagctgtaatgtcacaccccggtctttgatacctttacgtaaacattcgaccaaaccttgtttatgcagctgggctttaatacgttttaaaacttcttctttataagaaggaccatacgatttctctagcgtacgcatacgcttttcctgtgtatcctctaaaaaagcaaatagctcttctacatcgatggcatgctgtttgaaagtaacacttgtctctccaacaagaacacgctttttatagccattcgcaattaaagctagttcaatattcgtctcgaagcctttttctgaagtatccactgccatcacaactcacctcgctaaatcaagttccatatcacgcacatcaattttgcctgttactgcctcgtagataagggcttggcggtattcttttaatttatcaatctgtccgttaattaacttcttaatactttcaagctctgtacatttctcatttaaaaactctacgatttcattttgttctgatacagagggcattgcaaacttgtaattaaaaataaattcacttggaattcgctttaacccaccaacaccatacatagacgaaacgccttcttgtttaaatggggcagactgtgccaaataaaaataaaaagtaatattttgcttgggctttgctctaagaacatgtaattcagtagtaccaaaaccgatactattttctaagttttgcataacagctatatttccattttcaaaacaaggtgttaccttcgccattactaaatcattatttttaaaatacgtatatcctgaataaacatcttcaatattcttggttatactaatatcaacttcatttggtcctaagatattttccataggcaagaatgttactctaagtccttttaaagcatttacttcatttttatttggatttaaatctaaaacatttttcaaacgtttaacttcccaatgctcaggaatttcaccaatccattccacacctgaatctttcattttcacattcggatttaaaccttttgtaacagcttctgtgatgattgattggcgttgttcttctaataattcaatgagattttctttttgtttaataatagtctcaaagattttagtttttttatcaatatattttctaatacctatctgtaaatcatatgacggcaaatttacttctaaattctttattgtatttacagctagaccaggttgcgcagccgaaatagaatattgatttaaattcatactttctaataaataatacaaccattcattatcaacaccagaattgtgactaactacaactgcatgttcagaagcaaaaaatttaccgtttacttgtcttacactaccgcaattagccccttgtcttccaattaatatataattcccttcatgcgtataactttcagtatatccacgtaaagctcctccaccataaacaggataacttccctcaccatctatcgaatcacttgtaatgctgtctccactacgcatattagctaaatattttaactttattttcttccagctcattgaagcaccttcttcaactgctctgcaatctccgcttctaatgcacgaatctcgtccataatttcagttgagttgcgtaatgctgtgtatttgtagaaatggcgagtgaatggaatttcgtagccgatttttgtttttgattcatcaacccatgcatctggtacatgcggtaatacttcacgtgcaaagtagtcatgaatattttcttttaacggtacattttcagtatcacgtaaatccgtatctggctcgatatctgttttatttttcatgcatacatcagctgtttcatctttttcagatagagctgctaaaactgcctttaaaactggtgctccgatagtaatacccgcttgcttcaatgcatcttttagtactttcttgaactcgtcacgatttttatatactgtatcgctttctaacgtgcgtaaaacatataaaatttgcgtttgcagctttttaccttcttcaatttcaaagtgacctgcgtctccttttttctttgaagttgctaagtttgcaaaacctttttccattgcaacacgagcaagacgctcttcattaacttggaagtttaaacgtaatggacgttcgactgtaatttttgcgtagccgaagtcttcattattaaagatcttcacgtactcgtttggctgtgcatcgccgtataatcgaacaatctcgttaatttgctcttctgtaatttcgttccgtttgctccccatcgactttttcatttttttcgagaagtctacggcattgactaaccgtactttccctttatgaagaggtgctttattgttcgttaaaatccaaatatacgttgcaatgcctgtgttgtagaaaaggtcgttcggcaatgccacaataccttctactaagtcgttttcgagcaagtacttacgaatttcgctttcacccgagcctgcatcacctgtaaataacggcgaaccattcataatgatggctaaacgagagccttgtggattttcagctgtgactggcttcatttttgacagtaagtgcattaagaatagtagctgtccatcactcgttcttggtgttcctggtccaaatcgtccgttaaaaccttgtttctcatgttcttctttaattgacttctcatacgatttccagtccactccgtaaggcggatttgaaattaagtaatcgaatttatcgcgtgggaattggtcttttgataacgtatttcctaaacgaatgttacgtgcgtcttcccccttaatcagcaaatctgctttacaaatcgcatatgattcaggattaatttcttggccgaagaactctaagtgtgctgttgggttttgacttagtaaatactcttgtgctacagaacccataccacctgtaccagctgcacagtcatacaatgtttgtgttaaacctggcttcgttaaaatgcttgcatcgtcatgtaagaataataaatgcgtcattagacgaattacttcgcgtggcgtataatgatcccctgcttctgcattttcattgaaacgacgaattaattcctcaaatacatagcccatctcaatatttgacactgtttcaggatgtaagtcgatttcactgaagcgtttaatcgttaagtacaacaagttattttgttcaagcttatcgatttggcggtcaaagtcaaagtgatccataatatcacgagccacttttgaaaaaccatttatatagtcccgtaaattatcagcaatgttatctgaatctgttaacagcttgttgaaatcatatttacttgcgttgtggaagttttgctttgatacacgatttaaaatctgctcacgagcatcttcatttattgccgcaaactgctctgcctttgctaatacttcctcttttgtgctctctaatacgcaatcaaaacgtcgtaatactgctaatggcaaaatgattttaccgtagtcttctggtttatatggtccgcgtaaaacctctgcgattgaccaaatgaagcttactttgtcttggaagttaatcatctttatgtacctcatttaataattttcttggaacctaccctcatgtaactagatgaagataagttgagcaatttctcagatacttatctcgttgtaatagctaatcactcatattaccttttgacacctcatctattgattcatttaaatagctaacatcacctacaattataagtgtttgagtaagaaataaatagtatataaaacaatttcaccaagaataagggcgcgcgctcttggacttgtccaattaagtataacctgtccacattcaagcctccagaaaggtgtttaagagctctttcctttacccaaatccttatactgcccttactgttgaagtcccttaacaaacatgttacgctcattttatcgttcgataaaatcgaggaggggcgttaagatgtttttagcaatcaatgaaatgaagcattccaaattacgctatgccttggtgataggtgtcatgttcttgattgcctatttggtcttttttttaacgggattagcctatgggctggcacaggaaaatcgcatggttgtcgataaatgggacgccgatcacatattattagcggaagaatcaaataacaatttaaacatgtcaatggtctcaaccaatgtatttgacgacgtttcagctgatgagaaagcgattttagcgcaaacggcaggtgtgattacacaagaagatgtcgatgaaaaggtcaatgttcagttttttggcattgtgccagatcaatttttagtcccgaacataattgagggagaaatgtttacaaacgacaatgaaacggtcgcagatgtgagcttaaaagagcaatacggcctgtcattaggggatcgtataacattagcaggcaacgataaagaattgacaatcgttggttttacggatgatgcaaagttcaatgtatccccagttttatacacgtcaatcagggctaaccaagaaattcgttttgatcagccagaaacagtcgatgaggcgcctattaatgcaattgtgacgagagggcaactgaatgacacgcctgatgagttagaaacagtaaatatcgccactttcatcaatgaacttcctggttacagtgcacaagtactaacgtttgggtttatgattggatttctcattatcattgctgccattgtgattggcatatttgtttatgtgctgactatgcaaaagtcggaaatttttggggtaatgaaagcccaaggcatttctagtcgatatatctcaacttctgttattgcgcaaacgttcttattaacagcattaggtgtcatgatcggcttgctgtccacattgggtacatccttgctgttgccagaagcggtgcctttccaaataaagatcgaatttttcacaggaattagtgggctcatcatagtcatcgctgttttaggtgcatttttctcagtaagaagcatcgtaaagattgatccattgaaagcaattggataggagtggaaacatgggggcaattgaatttaaacaagtgaaaaaaacgttcaaagatggtgctcatacaattgaagcgttaaagaaaacagatttcgcggtagaaaaaggagagtttgtcgctattatcggcccatctggttctggaaagagcacgtttctaacgattgccgggggattgcaagcgccttccgagggagaagtattgattaatggtaactcttttagcaaaaagaaagaacaagagcgcgccaaacttagatttaaagagattggttttgttttacaatcatcaaaccttgtgccattcttgaccgtacaacaacaactacagcttgttgataaaatcagcaaagaaaatagaaagcaaacagccgacaacctctttacacaattaggaattgaccaattgaaaaagaaatacccagaagagctttctggcggtgagcgtcaacgagtcgccatcgctcgggctttgtaccacgatccaacgatcattttagccgatgagccgaccgcaagcttggacacagaaaaagcgtatgaagttgctgagattttggcaaaagaaacgaaaaaaaacaataaagcgacgattatggtcacccatgatacacgtttaatcgattattgtgaccgtgtgctaatcatgaaagacgggattttgaaagaaaaaatatagcaaaggcaattgttcgctgagccattgccttcctatcacacccccggtgttgaagcaggtaacattaaactcaatttctaggtgatgaaacatgtatgatgaaattttggatgtggctgaaacattatttatgcaacaaggctatcaggctacatcgacgagacaaattgctgatacgttaggcattactcagcccaacttatactactatttcaagaaaaaagaagaaatttattatcatgtcatgctccgcttggccacagaggtatctggaaatttagaacggatgtcttcaaataatgaacagccctttgaagagaaaatacgaaacatggtttattatttgcagcaacgccatccctttaatctgtttatgatgttgcatgatatccaacatacgttatcgccagacattgccgacaaattatttgtcctttggaccacgtcctataaaaagccgtttattgagttgctcacagaaagtaaattgcagctaagaagtaacattgatccagaatttgcggtaagtcaattgtttatctcgatttcctcttactttcatgccccccagaaagaggggcagatcgaccgagcgattgatctatttttatatggaatatggggatgaatagaatgaatcagcctagattagagcatacagctatctaggctgattgactgtaccgatcagttaccagattagttcggccgccgaggttcacttttttgataaacgtttatagtggatggaacaggcagttttgtatggtttaatttaagcataaatatccttcgctggtgttacgtgtctaatgccgattactccatcgtactgttgagatggaataagtttgcgtttatctactccggtttcacgttcagtttgttcatggttataccacttgtggggatccttgtttttgaaagactcacatataacatcatggttgtttgtagaaaaaagatggttttcaaggctattttttgaatgactttttatgttataaggtttgcccttattatttgcagcactgccctccttcatataaatccccaaatgatagctattgttgtacctttctgaataaaattcacctagcgatttttcatttagccaaccctgacttaatgaattgttttttctaatatggtagttgtgcgcccaaatgataaacttttcttcaggccatttgtttactagaaaagaaagatgctcaaacatatacttatcacgataataagaatacatgttaaaattcattaaacatagttctaacaagttcattctattctcgatagctcttagcatgaacatgtaggtagcctcctcaataacgtgatttaacataacttcttgtttcatatctgttaaaaatgcatatacacgaccatagatcaaatctagtcttttcttcgtcgataacattttctttctcataaacgttctagcagttattgtatccaccgttttttcagcatcagaaaaatcattcgctaaaccgtgattatatttatctaaaattggaaaaatgtaatcatgcaaagaatgattttggtattgaatatcgataccaaaagccgttaactccctattttggatgattttaaataactctaataactctttcgtatgccacacctcgggcaacgaatccattaaaaatgatttagtggacaactgatgtttattatgattggcaatcgctatttcccccataccgccctcaaagacaatcttattaaaaccaaactgttcatgaagatatttaaccatctttatttttagtttttgtatttcagaaacgccatgcccattttcaccaagaaaaatgattttcttttctttaaaaacatcgttatatataattaattccttatctaattgttgtagattcataaaataactccttaacacgaaattcttgacgctcccctttattttttggggtgtttactcgataagaatgttttgatgttttcttgttactatatgatttaatttgtaaagttcgtcgttcgtatttgaaaataccatttagtaatctataataaatttgattaatggacagtgctaaaaggaaggagaaggcatgaatattaattacttaacgttaagaagctttttagaaattgccaagcacttaaattttagtaaatccgcacatcaactaaatatatctcagcctgctctgagtcagaagataaaggcattggaagaggaacttggcgtgctgctgcttaaccgttctaaaaaccaagtcactttgacaaaagaaggagaatttttatatcggacgttggttccgtcatttacgaatattgatagttcctttaaacatttacaacaatttaaaagtgtgccgaaacctgttttacatattgcagccaccccttcagcagctatgagcattgtgccgactttaattaaacgactaaaagagcaacatccattactggaattcaacatattagagacgttgtctagccaagcgcttgattacataaagaaaggcgactttgatatggcacttatacgtacacctttagatatttctgctgagtttcaacagccattaagatggcgtaccgttactcgttctcccctatccgttgctgttgcaaaggaacatataatttctggttataatgaagtggatttgaatgaactaaaagaggaagactttttgcattacgaccctaaaacatcttccaccttgtattatcttatggaatatgcatgtatgtcagcaggattttcacctaaaatcgttgcaaaaggggccgagtttatgagccgggctgtattgatttctaacggtattggcatttccattataccggaagatatgattcagctatacagcgcttatgaaattaaagctgtgccaataaaagacatctccgttatgagttctatttcaatggtttggaacgaatcaagggataatgacattttaagagatgcaagaaaggtaataaatgaaagttttccagcacctattagctcagcttataaccatatatgaaattcgtatttcctataactaatttgatttgctatattgatttttgtaaccgattacaaagaagggatggaaaaggatgaaggagattaacgtattattatatggattaggacctattggtctcgaagtttttaaaagttgtacacgttctaataatattacagtgattggcggggtagacattgacccgaataaagttgggaaagatttgggtgaaatagctggcctttcaaatacgggaattaaagtgactagttcattaagcaacattccacatggagcgaatcattctgttgctctccatacaactggttcaagtgttccacaagtttggccacaaattaaatctctgttagaccatggctattctgttgtatcttcttgcgaggaactttcgtttccatgggtgagatatcctgagttagctaaggagattgatcaatacgcaaaagataaaggactttttgtcattggaacaggcgttaacccaggatttgtcatggattctcttgctgtatttacatcagcagttacgagagatatcgagagtattcacatttccagaaaagtggacgtttccaaacggcgcatacctttgcaacaaaaagtcggtgttggtaaaacggtggaagaatttaatgcacttgcagaagaaaataatattgggcatgtcggtcttgaggagtcccttcgattaattttaaatgggctgggtctcagtcaggaaaaaataaaaaaatcaattaaaccgacagttacttcaaccgacctagagttatcctctggtcatgttggtaaaggaagagtaagtggtttacacgaaacagcagtaagcagtggtactattcctattaccttagatctggtgatgtcagtcaacgtcgaggaaatcgaccgcatcatttttgaaagtaaggaccttggacatttggaatttaccatacccggaggattatttggggataccgttacagcaaatgtgctggttaatgtagcacaatcactaatgttttatcgtcaacaaggcttgagaacaatgactgacatccacacagtccgtaatatactcgattacgaaaaactcagctaacgacctttaatatttttaaatatttttgaaatttacggcatgtaccggttcctctttagaaatagagaactaggagtcggtggaacaagcgagttgattcaactaacaacttagtaaaatgcggaagaaggagctcatcataagcccatgacgttgtaagacgatgctgtcaatattcgtcgtgtaggcaataatggtgagccccttccttctgaatgaagtatcgcttcatactctttcaaggttgtttttaaaatagatttcttagattttatggtacaattacaaagtttggtaccctatataaaaaatctatttgtattttgttaataaggaggagggactatgaaggattcaaaacttaacatgtatggaggcgctatcggcggcagcttccctttattgatttttattgttggcatgattgttctcacattttcgggaaatgggggaatgacttcattttgggcaataggctggttagctttttttctcggaatcttcttggcaaaaaataaaagtgactactgtgctgcactcataaggggtgttgctaacagcaacggcgctgtggttatcacattatatttgtttgcaggagtttttgggcaaatcttgacagctggaggcctgattgaagggttgctctgggtgggattggaagtaaacgtacagcaaaattattttgcgttgttagcccttttatgtacgatgtttttttccttagctactggttcctcggttagtacagcagcagctcttacacctgtactttatcctgctggtattttattaggagcagaccctgtcatgttagcagtagggattttagccggtgctggttttggagataacgtctcccctcattcggatacgactattgcctctgctgccacacaaaatgctagtattagagaagttgttttagctcgtatgccaatggttattattgccgcgctagtttccatgctgatcatattcttgacaggtggaggcggcgaagtagtaagtgcacaacaaatgggagtggatgtagacccatcagggcttcttatgtttattagtgttttagtgcttattacagcagtattccttaacaggcatatgattgaagcatttgtgtggggaattgtatctgctgctttattaggcattctaaatggctcaattgtattatccgatttcttccacatcccaaaagaaagcggtgtctcatctggacttattgaagatgggatcttaagtattagcaatacgatgatttttgtgttgattatcttagctatcactcaaattatggtagaatcaggggcgattgaccgcattttggactttgttactaaaaaggttgcaaaaggggtacgttctgcagaattatctatcatttttgttacgacgcttatttctacacctatttcgcataatacagttgcagcgttacttgttggaccaggatttgttagaaaaattggcgataggtttaatctgtcaccgtcccgaaaagccatcctgatggattgttctgtcacaaccctttatttcacgattccgtggcatagcacgatcatcacatggtacggacagctatccttagcggctaataaatggggaattccgttgccaaatattttaacctcattccttaatccgtacgcctggtctctttttatcatcattgttattgctgccattacaggctggaaacgaacttatgctactcaaaaggatgatgaaagcacagcgatatgagtatgtgctaaacagggtagcgttcagtcgtgccgtttttatttaaaaaattgtcaattcaagcgcaacagttcatgggtaacctgcctcgtgggctgttcgccatcgtaagcattttcttagttggccattgatagaatcaatacaagcaaaatccgtcccttcgggtagaactctcagaaaccgattttcattctcgctattgcctcttggccaagaagaataaggagccacaaaataaaggaaagagtttgtttactcgatggatgcataacaggcaaactcttttccacgctctacggtggctgtttgaatggcgtatttaggtaaagaagttttcagctttcaaatggcttcctccgtagagacggccatgtccagttcccaatggccaaatgtctgtcgttttcggatctctttaagccgctgcttgattgatggactgggccaacagtgagcgcccacgggggcatagtgtttttggttttccattgacgacgacgcagcacagacgctgtccgttgtaaacgcccttgatagacccaccacagactctttctttcttattcctttggcagatcttggtgagaaacctattcgactctactagtttattcatttgttacataaccatcaagaactaacattcgtttctgcctttatcttctgaataccaaacatcaaaatgaaatgtaaaaaatcaagattaggaaacattcccttcactaatctcgattttttaagaaatcctattcaaagtcttcacttagaatgtctacacgttcttcaaaagatacctcccgatgaatttcatgcaacatccacacgtaaccattgctatcagaaaacatcgcattggagacgcccattttttcaattcttgtgacaggctgaatttcttttacatttgctgcaattgctttcgcataggtttctttaatatctggaaccacgatattaaaccaaaatgattgtgtgtcaccttcttttggggcaaaaagttgatattcatgattttcatcaagcatatggaaacgcgtaccatagatattaaatactgcttcgttatttccaactttaaaatttgtctcctccactacctcaacatcaaaaatagctttgtactgctccaaagcagctttactatcttttacaacaaaatcgaattcaactccatgaaacatttgaccactctcctataatttagcttcgccttttacaattccttcaatcatattctgcgataaaatttattatatagcctgctttaaatatttattaaatcatatgaaaaaaacattacatttgttttcagcatgttaatctaatgattaccattgaccttgatattttgattcaattattcagtccatataagagtaggtcttatttataacagagtcaagtcgtttactttgttcgcaatattgttccagaatatgactgattgtggtataagcttatttaactttctcctcccctttaaacaaagcatatctacaggggtatgttaagtccttaccactctggctaattcccatttggtaaaatggcttataaacagtacttcgataagaattaaaaagagagatattgcttttacacaatatccccttttcttttggtcgagatcctattcatttatacgtaccatcaaaatgccttcaaatcaacgttttcacttcaaatgctctcggtgaattactcccactcaatcgtggaaggcggcttgctcgtaatgtcgtacacaatccggttgacatgttcgacttcgttgacgatccgggtggagatgatttcaagcacatcccatggaatgcgcgcccaatctgacgtcatgccgtcaatggaagtaacggcgcggatgccgacggtgtaatcgtatgtgcgtgtgtcgcccatgacgccaacgctgcgcatattcggcagtgccgtaaagtattgccaaatttcgcggtcaagcccggcttttttgatttcttcacgcaagattgcgtctgattcacggacaatttttagcttctcatcggtaatttcgccgaggacgcgaatgccgaggcctgggccagggaatggttggcgccatacgatctcatctggaatgccaagttctgtgccaagagcacgcacttcgtctttaaatagcgcattgagtggctcaattaattcaaacgccatgtcttctggcaagccgccaacgttatgatgcgatttaatcgtttgggccgtgtctgttcctgactcaatgatatcagtgtagagtgttccttgagcgaggaagtccattttcttatcttttagttttgctgattcttcatcaaagacgtaaataaattcgttgccgataattttccgtttttgttctggatcggtgacgccttttaatttagtcaagaaccgttctgatgcgtcaattttgacgacattcatgttaaagccttgggtgaatgtttccatgacgctttctgcttcccctttgcgaagcaagccatggtcaatgaacatgcatgtcaattgatcgccaattgctttatggatgagcaccgctactacagaggagtcaacgccaccgcttaatgcacacaggacgtggcggtcgccaacttgttcgcggattttcttgatttcctcttcaatgaagttttccattgaccaatcgcctttagcgccgcaaatgtcaaaggcaaagtttttcaaaaggtcattgccaaattcggaatggcgcacttctggatgaaactgcacgccgtacaagttgcgggactcgtcgctcatagctgcaactgggcaagaaggattggaagcgtcgacggtaaagccctctggcggagccacaattttgtcgccatggctcatccaaacggtttgctcaatgggcaagcctttaaagagcggcgattggttttcgacatttagtaacgcttttccgtattcacgatgggaagccttgtcgactttgccgccaaagtggtgcgtcattaattggacgccataacaaatccctaaaatcggaatgcctaaatcataaatggcagggtcgcatttaggagagccttctacatacgcgctgttaggcccgcccgaaaagataatgccgattgggttcatttcttttaatttatccgccgtcagtttgtgcgaatgcagttcgctatacacaccgaggtcgcggatacgtcttgtgatcagttgattgtattgcccaccaaagtcaaggacaacaatcgtttcatgattcgttacttgcatgcagcttcaccctttgctaaagaaattctatataggaaaaaatcaatcactatcgcaaataaaacggctacaagagcaatcgcccctcggcattgcctttgcagccatataaatgaatgctctcccatttgtttggggctcacgcatttctttatgcagcttatacgccaataatcataacaagcccacttgaatgcggtcaagttctgattttgttcaggatgtttttccaattttcatgaaagcggtccccgtcaatgtcaggttttttattgctgtataaatattgctcgtaagcttcagttagctcccgcattccagtagactccagttcgctgtccacatcggttgcatattcacgcaatgtttgcgttgtttttcgcttgtagccatgaaaaccaagcaaccatagcaagcgctcataagaacggacaaaggactctgttcgcccgtcatttttgtacataccgtttacgtaagcacgggcaattgctttgcgcaacagaaacaaaaccaacgccgccactgcaagtatccctatggcggctcctagccaccagctcgggccttcttttgtttggcctaacgtttgtgatgcctctgtttcttcttcgttttcaggctcttgcacttcgtcttcatcctgctctggctcttctctttgttcaggctcgacatcctcctcatcgcggttttcgatgtcgatttcgggctgctgaaaggaaaaacctgaaaaactaggcgtcggttcaaacggcacccagccgacttccggaaaatatacttctacccaagaatgggcattgctattggcaattacgtattcttgataggtttcatcttcgccgacagttccctgtgcttccccctctgtaaaccctttggcccatctagtcggtatgtcaagtgttcgcagcataacggccatcgctgttgaaaagttatcgcaataccctctcgctgtttcaaacaaaaactggtcgacatagtcttggccttctgcgggaatagccacattttctgtttcgtattcaaaattgggcccgcttaaatattgttcaatcgcaacggccatgtcgtactggttgtccgcgtctttcgtaatgtcttcggccaactcaccgatacgttcaggcaattcttctggcaatgctaaataatcggctagctcttcgtcgttgctgtaatcaggtcggccaatattgcgcaagccttccacatagtacgtttgctcgtaaaattgaaactcgtatcgttgcggcaccaattcgccattcgcgactgtggccatcgccgaaacagggtccatttgcagcggataatcttgttcgccgactaaatctgttaccgttggcgaggcaagctctcctgggtaaaataagtggccgaattgttgctccccttcactatacaattgcaactccgcctgctgcgtttctacttcaacggcatcagcacgtttgcttccttgcaacggcggggtcacactccgctcttcgacttccaatgagtcagaaagctgccaacctcttcccgtatactcgttttttgtttcccctttccaatattggccgctttctacccgagcaataaaaataggcgtgtcatcttggacaaagccgccaccaaggcggcgatcatcctcactgtagccaatccgttgcacaggtgtgcctataccgctcggaacaaagccaaataccgattggagataaggaagagggtcaggccactgcggctcaggttttggcatcgcatagccaatcgacgctgctagtatgataaacacgcctagcaaagcaaacgagcggccaaatgtgcgaaacgataaaacggcgtgcgtgcctttctgttcaccgcgtttaagcaacagcagcagcccaaacagaaacaacccaacgataaaggtgcgaacaatcgcccagctcccgctataatcggtaaatgtgtcaattataccaatatagacgatgctgatcgctaaaaagagcaatattctccgtgcttggacaatccagtaaaacagtaggtaactgaggatggacaatagaattaaaaataaaaacgtccggtgcatatcggtaatgtcggccaaattgccagccgtcagcaaatagatgttataaaagagatcatctaaaaaagtaaacatccacatttgctcagtgcttgattctggaaacaacagatacaacgctccgagaatggcagcaaggcgaaaaagcaatgaccaaacaaggtggattttaaagaatgtgatcaagaaaaacacagcagaaacggcgacaaatagagcaatcgaatctgtgtgcgtaatttctgagacaggatagagccattccatcagtaaaagaaaaccgaacatgtataacacaaaatcacgataaagttgcctttttttatgcatcatccgcactttgcctcttgccctcctcaaactggggatggaaaagctgtgcctttaaccgcttaaattgctcctgttcccactcgccaactggagcagcggaagcaacaaacacaagcgttttacgtttttcaagctgccgtactaaacgaatggtattctcttctatttgcggcgttatcaatagagtcacccctcctagtagctgaagattaggaggcaggtgggcttgctttttcgttttcaatggcttcactttggcaagcaaacgcaagcctgatttccacgttcgctcattaagttgcagctgattccaaccattaggatacgtatgcaaaccaacctccgtacgtgctgacacaaaagtggctgccaaagacgcggcccaactcacactttcttcaaaccattctttttctagctcggtttccactacgctcggcaataaaaataacgatatttcttcgctctggtccgtttcaaactcttttgtgacgagccctcctacacctgccgagcgcttccaatcaatttgcgccatgcgatcgcctgccacataggggcgtacgccagaaacagcgtggtcctcatgattcttttttaattgcttggctacatgtgaaacgccgattgttcctaagccatgctttacatagtgataagcagggtagacaagcaactccgtctgaatcggaatcctttttttaacgcggataaggccaaacaagtcatttgctgttacaaccagtttgccaaattgttgttcccctcgttgcaacgctttcgcctcatacgaaaagcgcagctctttttttaacgtgaaaaagaaaatggcttcatgccgctctgccaatatcgaggcaggaacgtcgtcactcgcttcataataaaaaaatggaagcagccatggccttgagatcgtgatctctacattaaattcttcacctgctcttagttcctgttttgatatatggcgcgtggccttcactccaaacaaggaaagacaagaaacaagacatgaacaaataaacacaatgacgacgctataaaacaaaaaccaactgacaaagccgccttggaacatgccaaagacaaaggtagcagctagaataaacaggacaatcaaccatcggaaagcaaaataaacaaatggttttactcgtttcattaggttgcatgccttttccgctctaccggaacgcggatttgttttatcagatcagcgagtacttcatctgccgcttcttcacgcaggtggacatcgtgctgcaatcgaattcgatgcccgagtacatagggtgcaacagctttcacatcatcaggagcaacaaaatcacgccccattatgagtgcgtaagcttggcttgtccgcatcagtgcaatggaagcgcgggggcttgcgcctagttcaatctttccgctcgttcgagtggcatggacgatgtttactaaatactctttgacatactcgtcaatgtaaatgtttttgacttcttgctgcaaagcagaaatttcatcaagtgtgacgaccgcttctagatcctcaattggatgtttttgctcgacacgccctaaaagttccaactcttcttcaatcgtcgggtagcctaagctaattcgtactaaaaaccggtccaattgcgcttctggaagaggaaatgttccagagtattcaactggattctgagtcgccatgacaaaaaagggcgaatggatgaccatcgtttccccgtcaacagtgacgtttccttcttctagtgcctcaagtaaagcagattgggttttaggcgacgtacggttaatttcatcagcaagcacgacattcgccataactgggccaggacgaaactcaaatgcttgcttgttttggttgtaaatcgatacgcccgtcacatccgacggcagcaagtccggagtaaactggattcgcttaaacgagccgttaattgttttcgccattgctttgacaaaaacggttttgccaacaccaggcacatcttcaagaagcacatgcccccctgcaagcaaggcgacaaggctaaggcggatttccgctcgtttgccaatcatcactttttcaacattttcaatgatctcatctattttagctgtgcttgtagtcaacaaatcctaggcccctctccgtttctttttttcattgtaccattgtcctgttcttttatcattacagaacaagcgttagctttcaccgaaaaaaccgcgcacctttaaagtgcacggctttgcttgttacagttgtgacattgtttgcagcatgtctgcttcaattttatcccaagtttctttttgctggaatagttttcgcgtttttgggattagttctgtcttaaacgcttctttataggcatccgttgcaggatcaggaagctgctttttccattcggttacgagcgcttctatctcgccagcccgtggcccccatttgcctgcttctttcccttctctatcgaaaaagacgataatcggaattgatcgagctcgcccattggttaagtactgatccatcaactcaaggttttcatcgcggattaaaaaacgaacatccattaaagccgtttgcgctaatttaagaaaaatcggcacgtttaccatcgcatccccacaccaatcagcggtaagcacaacggctttcatgcctttcccttggagacgttccatttcttgcacggcgtccccgctaggaatgtactgattgtatatgtgaagcaacgtctctttgtttacttccatcgactctatgtagtcttgggcactcgcccctttttcaaaccaatcgagaagtgtcataagcttgctccttttttattactgatcgtaccatgccttaagtcatgggcgcaaaaaatttgatctttctagacatatttttgctgacaatccaaacactacatttaaaggagtggtgagatgttcaaacgttttttgcttgccccgacccttattatccttctgcttttaggcatcgggcaagtgtcaactccaatcgcctatgcgatcggcgataagccgtttacattcgtgtggatgtctgacacgcagtattactcgcagcattacccgtatatttacgacagcatgacggagtggattgtcgaaaacgaacggaaccagtccattaaatacgcgattcatacgggcgacatcgttgaccatatgacgaatgaattcgaatgggttcaggcagacttagcgatgaaaaaactagatcaagccaaaattccatacggcgtgctggcaggcaaccatgatgtcggacatagcaaattggactacagcacatacagccgctattttggcgatgcccgttttaaaaaaagccatgtgtttaagggatcttataaagacaatgaagcccactttgatgaaattcaagttagcgggcacaaattcctcattctttacctcgggtttggttggaatgacgaaacgctttcgtgggccaaagaagtcgttcaagaccaccctcaccatgcaacgattgttgctacgcatcgttacttgcaagtcaatggcaaacgctctgaagatggagacaaactgtttaatgaattaattaagccaaacccttccattcagcttgtcctgagcgggcactaccacggcacggctcagcggtttgaccgtattgatgacgatggcgacggtgtaaatgaacggactgtagtacagattttatctgattaccaaggctatcaaaaaggcgggaatggctttatgcgcctcctgacgtttcaaccaaaatcccaagcagtgacgatcagcacctactctccttatacaaaggaagactcattagaaaacgaggactttcataaagcgccgatgacgtttagttttccaatggatttttagccccatgcccaaattataacggttcatcacctttttagatggatatccatatcgtgtactatcctagaaaaaggtggtgcaatgcttgggctattattacggaggatttcaaaacaactgctgctgccctcccccgccttgtggaggatacggttatggaccgggcccttactgtgggccgagaggatttggcggcggcgggtttgcgattgctatagttgtggtgcttttcattttaattattatcattggcggcgccggcttttggggcggcggacgcggactgccttgctaactgaaaagaacattagcgtccatcgctaatgttcttttatttagtaataatatccataaggtgggtacccataagctccaggtccgtaaccatagggcggatagccatatccgtacccgtaacctccgtataaaaacggcgcagcaatgagtgatccgcctagaccgcctacgagaccgcctagaaatgcacttcccccatagccaaatggccttccgccatagtaaccaggtgggcgccggtaaacgggctgatgataatgccattgcgtttgcatcgtggtcccccttcacatctgatggggtatcttatgcactagcaggcaggcatgtgcggaagttttaacgagttgcttcaaaaactgcctttacttttgggacaacttcgccgctccttgccccttcctgcataaacgccaccaacatttcaggatcatcttggttataggcgacaacccatccaagaacatcgtcattcgattcaccttgactaccgcttaattcagctgttcctgtttttgctgctaacggaaagccatcgatttccattgcatgggccgtccctcttttttcagacaccactttcccaagggcatcatcaataattgcagcggtttcaggcgacagatggtctttccacacgacgccggtttgttcactttgctcaagtactggttgaatcatagcgccttcattagaaaaagctgtatacatcgtggcaagatgaactggattgacgagcacttgcccttgtccagaccctgaataagcgagctcaggctcggaacgaaatccgtcctctccggttatttgcgacttcttcaacggatacaaataatccaaagtttccccaaaaccaacagcttcagcatgctcaattagcttctcttcccctaattttagtgcttccatcgcaaaataaatattatccgagtacataagggcaccttctaaatcgactggaccacctggatccgtaacacggtgtatatggtaatcgccccaaccagatgcatcgtctggctgccaatcgtggccgcttacttccattgtctcttcggggacaagtgtccctgcttctaacccaaacgcagcagttaatgccttcattgtcgatcctggagaaaaactggcactaaaacggttcaacagcggcatttcttcgttttcctcgattttcttgcgctcctcgctagaaaacccaagtgctgctaaattcggatcgtaagctggcgaactaaccaatgccaacgtttcccctgtaagagggtctagcgccacacttgtacctgatttcccagcaaattcgttaaaaatcgcttcctggacgtccatatcaatcgttaagtggatatcttcgccatcttcgctttcagactcgataatggtttctttccgctcgccatctgcgcttgctgtataaatttctattccgtcttttgcgcgcaaacggtcttcgagcaccaattccaatccggctagaccaattttggaagaagaagagtatccttcgctactgcgcttttctaattcttccgccgtaatcggcccagtgtatccggttaaatgggcagcagcttcgccaaatgggtaaacccgcccgttcaagcgcctgtaggaggcggctgttacttgctctgtaatcgaatcggctaggcgattttcgctagcaggtaattgcttaagcggcacaaacgcctctggtgtcacccagccttgactcaactgctcttcaatatagtcttccgttaaccctaactcattggctaagatggacacagcatcatcttgcccttcaagcaagcttggctgcacacccatttcgagcacctcgccattagtcgctagcgcctgcccatggacatcataaagatcgccccgcattcctggcgtgcggtcaagccttaccacatcatcgccttccaactgaggaaataaaaggcgcggctcccactccaaataccactcattttcttcttccgctgcttgaacccattccattccttcctcaaaggaataaggtcccgcaatcgtttccattgaaatggaaatcgggatcgattcgattccttcaccatcgtagtcatctggaaaactcggatccactgaaaattctgctatcaaatcactaaaaatgcgctcgtgtttcgtaataaacgtctcctcgtcgacgttctcctttgcttcattcgtaagcatagcgtacatatccttgtattcgccgtttttccaatgttcaatataagtgttagtagcatcttctggagacgaacttgaacaagccgccaaagcaagtgtcattccggcgaatgccgaaaaaagtagtaatcccgaccgcttcaactccctaacagctcccttgctaattggtaagtcttcgaaaaatatgacaaaaatcataggataaaagattctactgttagagtagcatacttgtcgatacctttgaacctcttacgtctaaagtcacaagattgtttggaaaaaacagcctcaactttgctcttctttcgaagagaaccaggaatcttacactttttatttttcctctaaggaatggtcacaaagacactataccctctactatctcttctttcctgtgttagacccatattaagtaaaaaaagcgtacgaaagcagaggctttcgtacgcttttgtcattacgagcgaataatattgattttatcaacaatcggcgtccgttcttttgcttcaggaataaaatccccataaccaatcattaatgttgcgacaattttttccccaggctgaacaccaatggcttcacggaagacaggattgtaaatccagtcattcgtacgccaaatcatgccaatgcctctggcccaggcagcaagctggatgttttgaatcatggcacaaaccgctccataatcttcatcccatgttttttgacgagggtcctcaggcatgacaacaacaaggtggaggggaatttccctaaaataagctgcctttttttgcgctttttcggggatcttcccatcgctccctgcttgtgttttcaaaaaggcgtctacaaactggtttttcccttcttcagcgtatagaagaaaacgccaaggttccgttaatttatgattcggcgcccactttgccacttccaatatatcgactatttcttcaatggatacaggatcaggtttgaatttcttaattgagcgccttccctttataagctcgtcaattgcttttacttggttcaattccattttcactcattccttcgttctccattcttatcttttagtctaacgaaaggattaggcaaacgcaaggaatgattctcattttcatttagaccgtgataacaatcgcatcatatccccggctctttagttcagcaacaagtgcttctgcattggctttaaccgaaaaagcgccaacttggacacgataaagggaaccgctttggaaaattaaggcttcgtagccgtctgcttgaagtcgtgcttgaagggcttctgcattagctcgttgggaaaaagcacctgcttgcacacggtaaatcgtgccgtttccaccggaattacgccgcaaattgaacgcttgcgccaacccattgacatggccacgagcgacgcgagtcaaaaaggccggatcccgaagcttggccgcatcgttggcatgatcaataaacaggttttctgttaggatggctggcatggttgacgtacgcaacactgcaaaattagcggttttctttcctcggtccctttcactaagttgctgcataattgctggatggataatattttgtgcccgaaccgacccgcttgtctgcgatgtgtgaatatacgactcaaatccagtcccacctccagcattaatatgcaccgatagaaaataatcagccccccagttattggccatgttcgtccgttctgttaaagagacggctgtatcgcctgttcggctcatccggacttctgcgttttcatattcagacactaacatatcacgaatttgcgtcgcaattgacaatgttaagttcttctcttgcataccatttcctactgcacctggatcgttaccaccatgtcctggatcaataaaaattttaaccataaatgattcctccttaataatagtaggtgcttgtcctaagcgtctaaggctgaaggcagcgccaacagccttctgcatataaggataggactgctcccatcctgtaagggttaatctccatacctcaactagtggcagtcaacccttataatctacttgtatgaaacaaagggtcttgccgacatggacaaacgttagaaacgaattgaattaggtgaaaaatcccgctgatagctaggatttctcctcttcttatttccattacacactaaatttggaagttacctataaatccttttcgtttttcttattcggcttgtcttcacctgagtccctatcatcatcgcttttcgcaaaacctaacaatttttcccgaatcacaggcgggattttcactccactggccgctaaattttctacaacgctcaaacactcattcgcgatataaaaaagcacagttgccgaagcaaccatgcctttcaaatctaagacgatatcaatcatattggcaacaacaatgacaacaaaaatcccaattttctgagcaaagccatacaaagaaacccggctgcgaacgcttttgtttttgattgcttttgcaatgccggtgacaatgtcgaacaccatcagcaatatgagcaagtctagaaatttgacattgccgaaaaggtaaaggcgagcgacatctaaggacaagtcagcgaatgtgcctatatagcatcccccctttctatggcatgctgttgttttcaagctgttctagtttcctgttagtaatccgttaaccaaatacatttaatagagtatgtcactcagaatggctttcttgtgtttcttcctgcttcatgtcttccttttctttttgcagtaaagcgtaagcgtttttaaaggtttgtaattgcgcatcgatttctgataactctaactcccgctgccctagcctttccgctaaatactcaacacgggcgttcgctttttgtacctcatactcaagtgattggatatattgcttttgttcagaggataactcttgactcacatcagcgacctcctttcagagcattgacttgcttttgaatctctttaatcgcgtttgcctgttctttcattatccggtcttgcactttcactttagctagaattccagcgataaagtcatccattgacaatgccggaccttcatcagacggcgtgcgaaactcttccggtaaatcctctgaaataggaccataattcggtcggacataagcaccgtttctatcgggtgttttgtagtggtaagacattaattcaacttgatctattaaacgggcgaagtaatccaggtcaagaggttcaatgttttcctttacgttacgtgatgaaattttgtgcatcgtaaagtaatgcatgttattggtccaaacttcccataaccggaaattactcatccctacaagaccccacccagaggtatcaggcctaaaagtcggatgaagtcccgatttacttgacgtatttccccttcccatgacccaatacctactgccggtactgccacgcattggatcaaaacgaaactccccggaccttgagataatccggtcgaccgaatcaataaatgtagaacttgcactgtaaatggtaaatgtatcgtttgtgtttgcaccaacataacccatgtttttgccgccagggtcgaaaaacctaacaagggccggatcgctgccctgaccattaaaatttcgtatgccgattaaaattcggttccgagcattgctgtcaaacgccttaaatccgtccgcatccatctgcacagccatactgccattcatcgccctaaccataatattggctgcatctaacgtgccacttgtgattttagcggcactaatgtcgctaattttagcgttggtaatcgtggcatttgcgattttcgcgttgtcaatttgcccattgccaatttttgcgttggtgatcgcgccattctcgatctgtgccgtgccgataatggcgttttgcaacttcgccttgctgatcgatgcattagcgatcgcagcagtcccgactgctgcctctccaatatgggccgtcttaatcacgccattgtcaatcaacgtttgccctgtgatgcgtgtttttgcgccatcaatgcggacaccctcgctagataagttaatagcagcaatgacaccgtttttctcgacacgcgcattgatttgatcggcttgtacacttagcttagactctgcttgtgacatgcggtttcctaacgcagatgtgtcagacgctactaggctgatctcgcgtgcattttggtcgattgatgtttggagattggttacctccgatacatcaaccacctctatatcatcgacacgaacccaaccgacgctatgattagtcaccatagacacagataaagccttgacgttactaggacacttccacgtaccttttatttgtcgccactctgtttgcgctccatcccatccccagtctgttaccaacgtacctgtatctgcattgccaaaccttaatttctggttatctcgtactccatttgcgtctgcactcgtcttataccaataggaaatacggtaagtgtgcccaggtacgaccgcaacagggttagttacgctttggcttcgagttctaggggatgagcctcccttaaattccaatgctttcttacctgaataggcatcgtccacaatctcgccaggcccatgccagcctagccccccgccctcaaaactaccgtctggaatgatattgtcgcccgttgtagcaacgtgcgacagctctgaaatggtagtgctaaatcgatcagccctcaactctagctgagatgttcgactactgacattagtgatagctccggcattattatctactcttgtctccacgtttgaaacatcggcctttagcccattaattgttgtctcaaaattagactgtttctctgacactccttcaaccgtcttgctcagttcgccaaaatcagtccttaacccgctagcggttaactctaattcgccaatttggctggagagttgccctgtcgtgtcctcaaactcgtccttggtgattcgtgcagaaatggcgtctgcattggctcgtatgtctgcttcttgagcactcagctttccgtctatattcgttaaacggctagctgtcgccgatagttcgccttcgatgacgtctacgttagtggcgatgttagatacagtcccattaatatcgccaacctcacgggttaaattatcggtaatgctgtctaactcagctagtttgccatctgtgaattggaacttgccgtcgacatactctaacccggctttttcggccaattcgctatttatttgctcggtaaccgccttaatttcctcatcggtgtattgcttagcatcttgctgtaattgctcgcggaccgactcttccagttgatccaagttaatcgacccatcggcaataatttgcgcttccttactcagttcgcgcagtttggcagccaagtcttcgccaaagaaaatgtcctctgatacgattcgtgctgtcgtagcgctcacttcttccgacaaaggcgagtaacgctcgtaatagttaaaagcacggacacggaaataatactgtttatttggttctccatgaaagctataagtattgccaatccctcggtaaacgagtgtttctgggcttcctgcaaatccttgtacttcgcttgcatagacttcataacctgcaatatacgtatctaaatggctaaaatcccattccaccatgacggcagcatataaaccggtcgctgtcacattagcaggtatttcaggaacaatgtctggatatgaattgggctgaattggcctccccgcccgatcccatacatgggaattctctttcacttttgccagcacccgttctacttcttggtttggacttgaaaaaagcggcagaaactcccctaatacgacttcatcattgctaggatcaagcaagtcgcgtttcagctcaattactctcgttttttcttggatgaccggataaatgtcttcatcaaggacagcggccgtgtctcctaattgaatacgttcatgttcaaaattggagagcctgaataaatcgacaacctttccagaataatggacaagtggcgtacataccgtttgcaaatattcataggtttgttccaataaacggacagggttgtcttcatccaattcctccaaaatgccaaagcggtgcctttttccttcataatctcctcgtccccacaaggctcttgcctgttcatcaccaagccagtcttgcccttttggtttatcaatagggtcgcctttcgctttgctccattcgatctctttaaacgtaatcggtttgccttggtccccgttttcatcctcagtcggtttcccgtaagctctgatcgccgttttgacactgctcatatcaatcgtgcgttcaatttcagttaagtcttttctatattcaaatcgtttgcctgtatctgcccctcggcgtgaaagaatatcaatgtaccgaccggtaattttgcttccggcaatggtcacacggcatcttagttcgcccttaaacgtatttaacaactcggctacacaatatttggcattggtttggccaaattctacaggagcttcccctaactcggcaacgacgcctggctgccaacgtgtccgtgcaagaatactagaaagggcttgccttgcgtttgtccgatgaaactgaatatgttctataggttcatcaagcagttcattgactgcatgttcacatataaccgttttataggcagcatcgccatggcgatcttctacaaccacaatttcaaaaagttgaaaatcgccatcgacatcataaaaagcaacttgttgtccttcaacgatttcaagggcatggtcacaatcagcaaggattgtaaattcaaaggaatgtgcattgtttagctgttctgtatgaaccgcttcaattaaatgccgttcatcgagaacagctctgcatgtttcgtgcttatcaaaaatgaatacgttcattctatccccctctccctttataaccatttctccttatatgcgatctctactgtcgcagtttcgggatgaacggcaatatgattttctccaggatgtaaaaatagatctttaaatcctgaacgcagatcaagcaaaggcatcgcccattcatcgttatagcggatcgctgacttttcactgtcaatcacaacccggtcgcctgaatggaacattcgatttaacttaaatcggttcccgtctttttctatttgtacgttttctgcttcttcatggaaaagaatcgagtaaaccggcatcgctggtgcagtagctacatagtcgacagctatgctacctgtgaaatcaagctctttttttgccccttctgcgacgggatccgatacttgaaagactaattttcccgttttcaacaaccctttgcctgtaaaatcggaaaagtcgactacaaatgcatggtaggctttatctggctcatcaaaaaataccagttttccttcttctgctgaaaggtaataagccatttcccgcattgcttttctttgttcttcataacttgtggaaatcattaaaacatcaagctcgatcaagtactcgccccaccgtttatttgaagcatggacgccgtggtggacttccgtgttcgtaaatttccgtggcggcaatgaggcacgattgtcatcgaccagtttgagccactttgaaaaattcacgccattaaaagaaaaccaagcattcattttctcgcctccttttttagtagtgtcctcttgcacgctgtgccatttgtcctctccgtccaagttcaacatccataaacggtgcggtcactttagcaatttgtttgccttcaaggtggactggcacttcaatcgtcatgttgctagaaggatttgctgacagtccctgcaactctcttgcttgtacattgctatctagccgcgccaacccccggccaagtgaagaaccaatgtcgtgaagagaaggcagtgttaatgctttctcaaatgcatgttcaatttttggcacatctcggtaaattgagtctttaattggtcctccaaagttaagacggtgaatgtcttgcagcgggccttctttagcaggtgagaaaggcaagaaatcccgtatctttccagcgacattagaaattgcatttttcactgccccaattgcactagtaattccttctgcaatgctattaacaatgttttttcctgcttcgcgaaaacggccaacaaaattcaagacggcttgccaggcgctttgaattccattagagatagccgttttgatattagtcattgcagttgtcacacttgaacggacagcgttaaaaatggttgtaaatgtggtttttatcgcattaagagcacttgttaccgctgtacgggccgccgaaattccggttgaaataaaattctgcacaaagctaatcgccgttgtaactacattgcgaacagcattaaacacagttaaaaatactgtcctaattgccgttaacacagtttgaaccacattcgaggctgttgttaagccagttgaaatggcattgcggataaagcccattactgtcatgactacgttttgaataggagtaaaaatggtggagaaaaacgaccttattccatttaatgccgtcaaaaacaaattacttattgctccccacatttttgaaaaaacacccattaaaccggtaaacaaagaactagcaatttttaaaagccgcccaaacaataacaactgaacgacgttccatatcgcttcaagcgcaccagaaaaaagctgcttaatgccttcccacattaaagaaaaatctccagtaaaaagacctgcaaacgcctttactagccccatgatgatgttcaatgctcccgaaatgactccttgaatattgccccataccatttgaataagcgacacaatgaacggccaaacaaattgcataatcgccaaaatgccgttcataactggttcaataatgctctttattccattaaagatattggttactgcttgcataacagcagccccgtgctcatcccaaaacgctttgatttgcgccagtttttcagaaacaaaagtaacaatcgtagccactaccgtttccatcgtggtctttatggcttcccacgcttggattacaccattgcgaaacgtttcatttgtctgccaaagatacataatgcctgcaacaagagcggcaattgcggcggtagcgagtgctatcggtacaataaatcctgataaagaggttactattcctcctaaaccgcttacaatcactggtattattgttgctaggccatcaaaagctgctttaatagctactataccgagtaaggatgtcccggctcctgatataagacctaaaaaaacctctccccaattgccatctgcaaagccttgtgtcaccttattaacttcaagaactatattttttaagctctgttctaagcccgccagagcctttccgcttttttctatatcgtcaaaattaagtctaacatttgctgactctcctattgaaatcgccatcatcttccccctttccatttgttcgcttccatttgcatgttgccttcatcccattcggcggcgctgcgtttctttttgtcttgcaaaaaacgctggaaggcgctgtcttcgggcaagcctctaacaaatactaagaaccgcctccaagataggcggttctcaaatccctcttttgttaaatttatgccataaaaccggtagaaatctgcttctaacgctgcccacgcccaaatgattatccgcgaatcttggtttttttttgcgccgcggctgattgtgcgcctgagcctttgacatcatatccccaaagtttcataatgtcaggcacaatatgtttaaaaacgaaattgacgcctgctttcgactgttcgagatgggctagaaattccttccctaacattagttcaataaattcatacattttttcttctggcacagccatttgcgttttgcctctcactttttgtacacagtgccgaaagtaaaatgttgcaaactggaagggcatttcagttggaatttgaaaatattcgcccgcaaacttgacgtactgatgcttttgttcattcgctagctcagctaaagcatcatcataatcggcaacaagctgttcttgttggattttggccagctcttccgccttttcatttagcaattgcaaacggtccgccgagttattcgccacctggagcaccatcttccacaactgcttgttttgtgtttacccggaactcgccagagaatgtatatacaccttcagatacagaaccttcctcttcatacgtagtaaagaaccctgttaaagcgtatccagctccgtttgcgtctgtatgcttaataactgcttcttgacctaattcagctacccgttttaactctgtttggccatcatcttcaagtagtgcgatcccttccatcgccaccgtctcccctacagacgcagcaatgaacttttggcggaaaacgccgccaccttcaactgtatccccaagaccagttacatccgcctcttcaacctctagtgagtgtgtgaaagacgttaattttgctactactcgtccatttacttctactcgtgttccaacaaatttcttttctgccatgtcaattcctccaaaattatagtttctccgtttacccaaagcaaaggcggtgccggcaccattaacaaatggataacgaatgtgcagctcggttttagctaaccttgctacactaccatcataatacggaacgagcgttcgattctgtcgtgtttctgccatgattctgccacgattatggtaagataagagaaataggagaacacctttacgaaaggatggttgctagctatggaacacacttttaaagggcaagggtcaacattagtagttttagaagataaattaatcctaaaacatggaagaaataaacgcttcactagtagtcctactgtagaaatcaaatattcggacctcgataagttgattttacaaaaaccaagtattgtctcaggctattgttattttctacgtaaaggatttgatattcaggatctctccaaactagatattatggctgacgaatacgctataacaatatcttttgcccatcagtttaaacgttttctaaaagctgaaaagcttattaatcaatatctggataatatagaccaaaatgatactcccgtagtatcttttgctcacgagaaattactaaatgaactaataaatgggaagacaaaaagctatgactatagtggtttgactgggagtatagttatttcaaaaagtacgataacgttaaaatataaaaagtttctacatactggaggaaaaggttcaaaaacagtagatatccaaaaaatctctagcgtatccgtatcaaaaccaactatgacaagtggaaaagttaaaattcattacgaagggtttgctaatcggggttactatagtccaaaagaagaggctaacgaaatcacgatcacaaacattaatcaatacaaccaaatgcttgaagccaaggagctcattctcgctctcaaacgttatcttgagaatcaagtacattcgactgattcgctctcccccgccgacgaaatccgcaagtataaatcattgtttgatgagggtatcatttctgaagaggaattcgagaaaaagaagaaggaattgcttaattaaaaagggggttttcatgggaactgttcctacgttgcaattgcttgggctttgtgcaaataagctaggtggttagtggttgttcctgtagccaagtacttgatacaccaaagtcaccgttcctgtttttactaaaatttcctcttcatttttccatatatgtttgttctcattacccatttttaaataataaagaagcgccctttctttacagaatgggcgctgttctgttcatgcatctttcttcattattcattattaactacacactttctccttcgcttcatccgcaacggccttggccacggcaggggcaattcgttcatcgaacggagacgggagaatgtggccggcatgcaagtcttgcccaacaatgttcgcaattgcttttgcagctgccagcttcatcgaggtggtgatggtgctagcgcgggcttccaaggcgccgcggaaaatgccggggaaggcaagaacgttattaatttggttcggaaagtctgaacgtccagtgcccacaacggccgcaccagcagcggacgcatcttctgggtaaatttcaggcgtcggattagcgagagcaaatacaacagcatcgctattcatccgcttgacttgttcgcctgttaaggcgcgagggccggagacgccaatgaagacatcggcgccttcgattgcttggtcgagcttgccggtaagatgacgtcggtttgtttgggccgctaattctttttggcgttggtttagccacggctcgttttcttggacaattccttctaagctgacaagggtgatgtcgctgcaacctgcttctagcaaaagcgtggcgattgaaaggcctgctgcccctgccccgttgatgacaatgcgggcgctgttcaaccctttatcgacgacttttaatgcattgattagcgcagctaggacaacgatcgctgtgccgtgctggtcgtcgtggaaaaccgggatgtttagttcttcctgtaggcgttgctcaatctcaaaacaacggggcgcagcaatgtcttccaaattaataccgccaaatgtaggcgcgaccgctttaattgtcgcgacaattgcatcgacgtcttgtgtctctaaacaaagcgggattgcatccactccggcaaattgcttaaataaaacggcctttccttccataactggcatagccgcttctggcccaatattgccaagaccaagcactgcagagccatccgtaacaatggcgacaaggttgcccttaatggtatggtcgtatacttcgtctttattctcagcgatgcgcttgcatggctcagctacgccaggcgtataagcgaggctcatatcgtattcatttattaaagggactgtgcttttcatttccattttcccatgcttatgcagcgcaatcgctgcctccctttgctttcgtgcttgtaacacgttatcatactccttcatttcttaaagtcctaaccaacgtaatacaaatgttgctaaaataaccgtccctgctccgcctagtcgcgtcgctacttgcgcaaacggcattaggctcatgcgatcggacgccgataaaatggcgacatcgcctgtaccgcctaggccgctgtggcaaccggtgacaatccccgagtcgacagggtgcatgttaagccactgtccgacaaaatagccggttgcgatcatggcaaagacgactgtggcgcaaatcaggacgtaggaaaagctaataatgcctgccacatcttcaaggggaataaacaacaatccaagccctaccataagcggccacgtaaagcttgttgatacaaacttatataaatgaaaagcgccttgctcaagttgttcaggaatcagctttaatactttcgcaatcgcagcaatcaagatcattaaaattgctgctggaatatgcaagctcgattccattaagtggccaaacacataaaaactgcaagcaacgaggagcccagctcccattagcgcaaaattgactggttttgtatcatcaatcgatttcggcattactggcccttttgtcttaacaagcactccttttcctgtaagatggggcttttttgcgccgagctgttttaaaagggctgctccgataatggcaaagatattgccgatgatcgctgccggaattaactgtgatattaattcagccgcaggtattccaagaatcgtgctgtacccagctgacaacggcaaaatgccttcgccaatgccgcctgccaaaataggcacaacaataaaaaacaatgtatgctttgcctcatagccgagtaaaaggcccatgccgactcctgcagccattgagacagcggttccggcaacaagaggaaccaacattttcgtgattccttgcatgagtaccacgcggttcatgccaagaatgctgccagctactaaacaagcaatatagaaatataaaaagttagatgtcgtcattaaattcgatacagcatttacagttgtttcatttaaccatccaaaaaacatgaatgcggagggtacgaacagtgctagtattgctgggccgccaatgctttttataatcggcaggcgggaaccaatttccccaagtaacattccggctaccataataatcgcaaccccgccaatcatgtcagcaggcaatttttgaaaatacgctgcagccaggacgatggcagcaatagctatataaatagggaaaggcaacactcctaccttccaataaaaggggttccagcgagaggatgctcgatcatgttcatgctggtattttcgctcgcttggctctgaaaccgtttttatttgctccaattgaaagacctcctcgtttcttgctttatcttaaacaagctcgagcagggtgaatagtttatgtaaataagcgctttctttttgtaattaaaaaaagcaggcctttcttttaaactcaaaacgaaataagccagttattgattctaactggctggaatccgtcctaacctggcaaaacagtaggctagggcacgtattcgttacaaatagggctttattttccgaacattgtctttatcgattcgataaatgtgaatcggtcggcctattgatccatacgttggctgtaactgcaacacgtctaattcttttaaaaacgttaagtattttttcacagaaacacgagagagacgagcatgaagggcgatgtcttctgttgaaaagctatcttgaccgacttgcctaatcgcctcccaaacttcttgcagcgtttctttcgtaagcccctttggcaacgtttgtttttcaagcgtatgttttttttcaaaaaacgtttcatcaagctgtttttgatcggtcgtttcttctttgcgaaagaaattgtaacggctttggtaagcatgcaatgctttttggaaacgggaaaattgatatggctttaaaatataatcaactgccccgaatcgaagtgcagtctcgatcgattctttgtctgaggccgctgtcatcaggatgacatctgcttcgatcttgttttcgcgcaaataaggcagcagtgacaagccattttccccaggcatgtaaacatcaagcaacactaattggattgttttgttttctttaagatgctgctttgcttcctctactccgccagcctcagccgccacttgaaaatctggcacatcgcgcaaataacttttaacaacagcggcaaccatcggatcatcttcgacgataagcacctgaatcatgtgtgcctccccctctctattggcacaaaaacagtaaaagtcgtgccttgattgatttcgctttccactgtaaaagctgccccaatcgcctcgacgctttgctttacaagagacaaaccatagccgcggtcttttccttttgttgaatagccacgcacgtacatcttctccagttctacttcactcattcctgggccattatcggcaatgcggataatcaattcttcatcgagcacatacaaagtaaccttcacgcttccgttttccttgccagaagcagcatcaatcccattatcgatcaagttgccgagaatcgtggtgagctcaagcgccagcctttcttggggcaacggttcaatcaccgtgtcaatgacaagtttcatatcgaccccattttcccgggcgtcgctttttttgccgagcaaaagccctgcaaggaccgggtctttcaccctatcggtcgtttgctttaattcttctgattggttgccaacaatttgggcaacataggcctctacttgttcatactcttttgtatgcaacataccgagaatgacttgcaggcggtttttaaattcatgggtttgtgcccgcagcgtactagcgtacgttttaacgcccgtcagttgttctgcaagctgtttcatttccgttttatcgcggaatgtggcaatcgcgccaataatttggtcatttatccgaaccggaacgcggttaacgacaatggtaagtccgtttaaatcttgttctttgttgtattctggctggccgctagcgagcacatgacggagcctagaattttgcatataggcttcgacatcgacaccttctggctttggcggcaggccagcacggtcaaaaatcgcttgtgctgacttgttgactagtgtaattttcccatcggcatcaacggcgatcattccttcaatggtcgattgcagcatggcgcttcgctcttctactaatgtggcgattgctcgcggttcgagatggaatagtgtttttttaataaagcgtgataacagaacggcgccaactaaacctgcgcttaatccaaacagtgtgccaatgagcaaatttacgcggtttgcttggagagctttttccaccacttcgagggaaatgccgaccgcgactgctcccacttgctcgcctgtctcggcataaacaggcgtaaaggcccgcaatgacctgcctaacgttccaacagacgtggagacactttcattcccgttcagcgcttctgtttcatctccaccaacgaaagctttaccgactttttctcggtctgggtgggcataacgaattccgtccatatctatgataacgacaaattggacatcagcttgtcccataaaggtttcaacgtactgttgcacaggttccgtctctttttcgactaacgcttgctggacaacaggcataagcgcaaccgccctagcaagctgctgcgctttttccgtttgattttgctcaatttcttcttcaatcgtccgatggataagaaggtccgttacaagcaacgccgcaatgacgactgccgaaacgagtaaaaaaatcgttgtccgcaatgttggccttttataggagcgttttttctctctcgccttttgcataaatgtctccttcttcctgatcctaacaggcagtatagcacaaaaaagaccagcgttcatttgctcatgaacgctggcaacgtgttgacgttcgctcagatgccttccaactctccctgttcttcctcccacacagaaaacaaatagtgtagctttgtaaacgccctgttttttatgcggtaatattggcgctcgctaatgagcatatccatgtatacttgataatcaaaccggtctgcctcttgcaaatagcggcggacaatcaactcccgctcagcaggcggcaagcgattgacacattgttcgatcatcgtcatgtagttcttccttttttgggctgcttcaatattttttagcgctgtctgttcggttgtagaaaagaacgatcgagctcccgtgtgagcaggaacgaattgaaagctctgtgtcgtctttggaagttcttcataggccattgtcaggcgataaagattgtacgtttcaagttttttttcgacatagcgtttttccgttttgttcatagccattccccttcatgttcgctttcctactaaagagaacgaaggttcgctaaatcaaagaaaacaagaaaattttccttaggcgtgaaaacgccctaaaaatgtttttagccgttctgtttttgggtggtttaaaacgtcaccaggcgtgccttgttcggcaatgctgcctttatcaagaaacaaaatccggtcagcaacgtcacgggcaaaatccatttcatgggtgatcaacatcatcgtcgtttttccttcttctgcaatgtcgcgaatgacttgaagcacttccccgaccaactctggatcaagggctgctgttacttcatcaaacagcatcactttcggttgcataaccagtgaacgagcaatggctacacgctgctgctgcccaccggacaattgcgatggatacatgtcaactttgtcggcaagcccgactttttcaagcatggccacagcccgttcttttgcctcgtctttgctcaagccaaggacgtggataggtgcttcaatacaatttttcatgatcgtcatatggggaaacaaattgtattgttgaaacaccattccaatattgccccgtactttgcgcaaatgcttttcgtcagccggctttagctcgccgttcacttttttatgccagagcatttctccatccacttcgatcgtccctgccgttggctgctccaatgtcatcaacatgcgaataatcgttgttttgccagagccagacgggccgattagagcgattttttcaccttttttcacgtcaatgtctaaattgttcaaaacgaccgtatcgccaaatgcttttttcacattgcggtaacggacaagcgtttctgcttgctccatttgcacaactgaagctggttccactttctccatgacttcactcatgttttcactcctctagtttcaattttattgccgtgcagcgtaccgactttccgttctaaatagcgaataaacacagcggacggatagcttaacactaaaaataagaaaccaacgatcgtaatcggctctacataacgccaatcgcttgtaccgattgactgggcaacagccatcatttctacgacaaaaatcgccgaaagcaacggtgtttccttaaataagacaattaaatagtttccaagcattggaatgactggaggaatagcttgtggcaaaatgattcgtctccatgtttgggcacgcgtgaaatttaacgcctggcttgcttcccattggcttttaggaacagcttcaatccccgaacggtaaatttccgaaacgtacgtagcataatggaggccgagcacgatagcgcctgtttggaagcctgttaatggtgttgtatagtagacgaaaaacagttggacaagcggtggtgttgcccgaataaattcaatcataccggcaaccgttagtgccaacggcttaaaggatgcacgccgcaaaagcgttaaaacgaggcccgctgttagcgaaatgcaataagcaatgatcgtagctgcaatcgttactgtaatagcggaaagaatttcgggaaaaatagcgatcgcaaattcccaatcccatgttttgttcatgatgtgctcactcctttagaagcccgtttttccagccagcgggcaaggaaaatcaaaggcagcgctaaaataaagtaagcgaccagcaagtatgtgtaaatttcaatttggttggacagcgaattgttgctgcctcggagtacattggcttggaacgtcatatcggctagcgcgataaaataaacaagcgacgtccctttcaataattcaatcgcgttattgccaaaaccgggcaacatcaaacggaccgcttgcggcaaaatcacaagcctcatccgttgccattttgacatgttcaatgaaatggcagcttccgtctggccaacggcaattgaatgaattgcccctctcaccacttctgaagcatacgcgccgtaatttagaccgacagcaattgaaccagctaaaaaatttgacatcgacaggccagggaaaatcatcggtagcgcataaacaaaaaagaacatttgcacaagcaacgatgtgccgcggaacagctccacgaaaacagcagccacactgcggatgactggattttttgatgttcgcatcaaaccagcaacgagagcgatgctgtacgcgacgacagcgcctactaaaaaaacttggaccgtgatttctagcccttttagaataaacggcataaagctagaaaagttattgaacatcctctcacctcttatcaactaaaaaagggagcatgggattccacctatgtgagcaccatgcttccctcttgccctttaggcattgcagcgatcttccatagtgatgtcttcaggaggcaaattggcttcagtgaagccgaactgttcaatgatttcaagtaactcccctgaatcaatgagttcttgcagtgcggcattgtattcttcccgcatctcttctcctgcttccgattgtgggaagacggctgcaccgtaggcgatttgttcctcgccatcaatcacaggctgtgtaaaatcttccacaaattcgactttgcctgacgtattgttttgagcagctgagtttgctgtcgcatctgtggcgaccatcacatctgcctggccattttcaacagcagcaatattgtcggcaatgctgtttccgctgacaaattggctttcatctgctcctagtgcgagcagcatcgcttcttggttcgcccctgccataagcgcaacacgaatgtctggatctttggcaatgtcttcatagcttgtgatgtttagcgggttgcctgaggcgaccacaatcccttccccgtactgcatttcaatattgccgaaattaccatttgcgcaccgttctggctggatgtccatcccggctgtaacaatgtcaaactgtccgctgttgacgccttggatcaatgctccaaaatcaacaacagtcccttcaatatcctcatagcccattttttgcagcacagcccgggcaatttctgggctggcccccgttacttctcccgcgtctgtgtcaatgtagccgtatggctcttcattggccacacctacttggattgtgtttccgccgccacatgcagccaatacaacagcagatgttaataaaccgaagattcctgcttttttcactactcgatctcctcctgctgtccatcatcaaaaacaagctattttttactttcccaaccaacagcctctttttcatgaggacactttttcggtctgtttttaacatgatagcacagatacacattcttacaaatttcgtatcacttaatattagcgcatttattcgcctatttcttacttacgttcgttgtcgttcgagtatgtcttaatttcttatgaataagcccatatcctctttgatacgcaaatataactataattttcaattttcttcatgttaattgtcgtcttttttcctattattgggaaatactaaacaaaaaacccctttccactgcagaaaaggggcgcattcgctattcttcactgtcttcgttcggttgtgcctcttgttccaactcggcttgttgctgctccatcatttcctgtgcttcttcaatatcgattgcttcgtttgtgacttcgtctggcacatgaatgtcttctacttcgttaaattgactatacgtgctcgtaagcgattgtgtttgcacgtctgcttcctcttcattttcttgctggttaggcatttgaaatcctaatgtcattgttgcctctttttgcaacaaagagcttttgtcaatcacaatttcgatatcaaaatcggttacttctaagcccatctcttttgcttgttggcctccagccatttccaaggccaattcctttagttccccgtccgttcctgaggcagagaggatatagtcatcgcctttgtcatttagttcaagctgatcgctatactgtttcatcatgtctagttgcgcttcagccgggcggagactttccgcgccagttatgccagcctcctcggcatcaagcttaatccattcgcctatgcttggctcttcataatagtaaatgccgtcttcaataaactccgtgttgacatctgtttctccacttacagcatccggctgcctatgttcgttcgttaaagcgaccggatcccttgtaagttgaagggaggcattgttttcgaaatcatcgctatgcacagccgtttctacggcataactgttcaaattccccatcgcttcatttgaatcggttagcagctgctcgatttcttcgccagttgcattgtcaccacaagcagtaagcgcccctgcacccacaagtactgaaacaactgctagtccatattttttcatcgccttacgtcctcctttaaacctttgttcattgccgcttgtgccacactaacacaagtgtctgtaacaaaaaaggagtaagcgcgatttccagctactttatagattcatttgttatttttgcatatttaccatagctcaagaacagtgcttaccacacgcacttgctcaagatcaacctttggccgttgtggatgaatgtataccgcatccattccgagcaaaacagcgggggcgatttcgttaatgaaattatcgccaacactgactgcttcttcaggttttacttcatagtgggataaaagttgctcaaaaaggcccatcgttctagtcggtttcttggcagatgaaataatgtgctcaaacacgccttcaagccctaattctttaaataagcggccaacatcatcccggtcactatttgtcatcaccaccacatgtgtgtgtttcttcagctcaagaagcttgtcccgcagcccaggaagaggctcaagttgaaatttgtctgataccatatattcttttgtcgcttgatagctggaataacagtctgttactccatagtgtttggcacagacaaatggataccaccaaccgtcgccaattgcgatcatgtcttcaaagttaaacgacaattcaccagtatacacttcttcgacagaagcctggtcgtactgttcgccttcccatgtatgggcagcagttactttcaatgtcattggatcaatcgttagaacagcgtcacgggcgacatcgtatgcttttccaatttgcacaacatgattccctgctttcatcgcttcgtaatcaagctgaaattcaagccgatcttttttagccaccttttgttgcaaatgggttgcataaaaatcaaaatggtcggtcccttcgtataacgttccatccaaatcaaaaacaaccaatttatagttcataaaaaactctcctttcaagtccctttccagtttaaaccgatctcatttggcgcgccagctgttagcgacaaaaaacacggaagttcagcaaactcatctgtcggccacgagtttgtacttttatttacaaattgaaaacggttcactgagatacttttttacaagcaaccatagtttttcgcattttgcaaacgaactgtaagattgaataggcgtgaaacagggtaagataaaatggaggaatatcttgtaaagaaatggaggctcggagatgaacaagccgttgctttctgttatcgtcccttcatttaatgaagaggaaaatgttgaaccattttattttgctttaagggaaacgcttaaggatacccactatcgctgggaagtcatctatatagacgatggcagttccgatagcacgctgccgttgctccagcgtttatctacttggcatccacaagtacattatgtgtcgtttacacggaattttggcaaggaagctgctatcgtcgcagggttccagcatgccaaaggagactgcgtcgttgtcattgacgctgatttgcaacacccggtccatttgatcaaagacctgttagaaggatttgaagaagggtatgatcaagtgattgcttgccgcgatcgaaaaggagaggggtttctccgcagcacagcctcaaagctgtattacaagttcatcaataaaattgtcgatgtggagctcgaagacggtgtcggcgactttcgcctgttaagcagacgcgctgtcgatgcgcttttaattatgagcgaaggcaaccgcttctcaaaagggctgttttcttggatcggttttgaccaaaaagtcgtttattacgaaaatgtttcgcggcaaaatggcgaatcaaaatggtccttctctaaattggtcaattatggcattgatggaattgtatcttttaatatgaagccattgcgcatttgcttttacatgggcggctttattttagcggctgctcttctgtacattttcatcatgtttgctcaaatcatccgtacaggcattgatgtccctggctactttaccatcatttcagccgtgttgtttttaggaggggtacagcttgtgtctcttgggatcatcggtgagtatattggcaggatttacaatgaaacgaaacgtcgcccccattatttagtgaaagaaacaaatgcgactaaaggaaaacggtatgaacgagcgcactaacatttggaagaaaatctaccaaaactcgtttgtccgttttgctttcgtcggcggaattaatacaggaacgttttacttgctttacttgctgtttcagcaagtcttttcgctccattatttagctgcccacgtgacagcttttttgctgagtatgattggctcttattttttaaatgtattttttacatttggcgtcaagccttcttggaaaacattcctgcaatttccgttgacgcaagctgtcaactttagtgtatcgacagtgcttgtttttgtacttgttgaatggatcgggttgcctgccccccttgcacctttagtggccgtgctattcactgtcccaattacgtatcttgttacagcaaaaattttaaaacgagatggagtccagcatgaagtttaatttaaggacattgctttctttattgatcggaagcgtgctttttgcagcagctgcgcacgcttttttcttttatcagtcggcaaacggccaattcatggtcggtccaaatgatggtacagcacaaatgttgccctttaagcaatttctttacagcctgtacagtgaaggatcgttcttttactcccttcagtttggcctcggtggagggattttcagccaactagcttattattttgccacaagtactgtattctttcttacatttcttgttgtctattctggcgaaatacttggactgtttgctgatcctgacacagtccttttttggggccaagcggctgtctttgtaaacgcattccgtcttgcggctgttgtgttcattacatcactcttattttgctatatgaacataaaagcaaagtacgcctttatcggagccgtgttatatggcggaagtgtgatgtattttaggcacgctgctttttgggaattttttgcggatgcttatttatggttgcctttactcgtgcttggcgttgagaaaatcattcgcgaacagaagccatggtggttgattgctgcgattgctttgtcactagtgaacaatttttactttgcttacataaactttctgtttattggcctttatgcactcttgcgctttttctttcctttggccgatcatgaaagttccatcaagcaacagctacgcttgtatatcccgtctgttttcatcggctttttgatcggagcaattgcatttataccggcggtttacgggtacgtcaataattttcgtcccgcctttactgatccaatccagtggatggactggcatgacaacgttttttatacgagcaggctgctcattttgccagctattttcatcttttgcctgtttgcacgctctctttataaacaaaagccttttcgcttttttgcgtttatggccttgttgtttgttgctttccattatagcccaatgatcggtagcgtttttaatggcttctcagctccccaataccgattccaatatatggggtcttttttgctagctgctgctgttgcctttgctttgccgtcattaaaatcactggccaaacgcgacttttggattgccttttgtctaacaggttttgctttcgcgctcagctatgtattagggtataacacgtcgtccttattccaatctggccaagcttatttgctgataattagtgcagtgctaacacttgtgcttttgctcttcgtgcataaacatcctaaagtttggatgcccgtcttactcgttagccttgccgtgttacagcttggacttgcgaatatttatcaaaaagagcggctctatgaaaacggaaacttgagccagacatcggcagcatttttgcaaagccatgagtatgatcacgacgctcagcgggagctgtttacacaaacagtcgatgaaaggcctctttccagagtagagtgggtagctgatttccgcaacaacacaccgcttgtccaggatttttatggcacgagcgcctattcgagtgtattaaataagcatcttctgttcttctactatcatgatttgcaaattgacatgaaccgggaaagcgtcagccgttattctggctttggagatcgtgctaacttgcatagcttattccaagtcaaatataaactcgtggatcaacaaaaagaaacgccgatcccttacggtttttcagaagtggccaacaatgaacgctatgccctttacgagaatgaaaacgtccttccttttgcccgtgtttcttcttcgacctatagtgaagatcagctttcgtcgttaagcgtccttgatcgggaacatgcgatgcttgaaggcattattgtcgaaccaggtttagaaacgggcgagtttataccacaagctcaaaaccgtataaacgatgctgaaattgaagcagtaggcggaacatacgaaaatggcctattgactgtgacggaagaaataggcgggcttgacatttacataggtgaacgggatgaaagcgagatcgatgactacttatccttttatctccgaaacaattctgagactgctccattatttcagttaacagtcaatgaattcaaaacgtcgcgcaaatcccgtgagtcgatttaccgaaccgatgtaaaccacataacgattcgtgtagccgccaatgacgtattatcgttacgcgtcccagaaggaagctatacattaaacgagttggcgctttacacagaaacctatagccaccttgatgaagcagttgcaacaagcgcagacattccagttcaattgtcttcgcgggaaatatcggttgattataacaatgatgaggaaaacaacgtgctggccatccctgtgccttatgaaaaaggctgggaagcaacggttaatggcgaaaaggccgacttgcttaaagtaaactatgcctttctcggcgtacccttacaagcaggggaaaatcacatcgtcttttcttattggccaccattcttccgcctttccacctttttaacagccactggtttgcttttagcagcaggttgggcgattgcaagaaaaaaacagcgataacgctgtttttttcttgcctttaaacaacgaaactgttattatggaagttaaatctataaaaaacagccacggcaatattcatatgattatgacaaaatattaaaaaaggaggattcttaatgaaacgaatttttattggctatgttgctttgctcatcgggcttggcgttctactgctttacttaggtgtttcagaattggcaattacttgcaccatgtttgtgttactcgtactcggttcaatcctttctctcctattcaaaccccgcaaggctcaaagctaacaatgaaccaggaaccagcgaccttttgaccgcaacagagttgtccgctacaatacatgtagcgacactactggaggttggacatgtccaaagctacccaaaagaaaccacctaatgagacatttggaatgatttttggccttttgattggaattggcgttagtattgctttaaatagcatcccaattggaatcgctattggcattgttgtcggtacaatggcaagcttttattcaaaaaaacagaaacctgacaaagattaaccggctcatttcaggccggtttattttgtaaaacgctagcagctcatttaattgttaattgtggctctcgtttttggttgctcattcacattcatccctcaacggataagtctagtctaagtaaggccggttatttgtgaatgtctgccttcttcagcgcataaacataggtttatacgatttatgcgaggaggcaaactatgtttaaaaaacgggccgctccctctttctcggggcctccacctactccatctgctggtccagtgacgcggggagcaagttcgccaactgtatccaaggagcagcgggctgaattgcagcaatttctccagctagcttaccaatccgtactagaatatgaacaacttcgcagccaagcgcctacgcaacacttggcttctctcattgatgcaacgattgaagaagaaaaaagtcattatcaaacactgcttcatgcttataagcaattaagcggcaaagaccctacgattaccgaacctactttacctcgaaacgactatatccctgctttaaaagcggcgtttgaaaaagaacaagctgcggcttattcgtttgaacaggcagctcgctttacgactcatcctgctttgaaagaagtgtatgcttctcttgctcgtgatgagcagcgacatgccttatggctgctttctttcttaacgatctatagcactggtcgaatttcccattaaaaaaagctagaagcgcattgctctagctttttagctcgattcgttctggcaccgtatagacattcatcgagcgattgcggataaaaccgactgttgtaatgtccaattcctcggcaatttgcagcgccctatcggttggggctgatttggacaaaactagctcacaaccgattttagccactttgagaataatttctgccgacagccggccgctaaagaccactaatttgccgtgcaaggaaagaccgttctgcaaacaatgcccatagagtttatctaacgcattgtggcggccaacgtcttctcgcatgagaagcaagccatccttcgtggccaatgctgcattgtggacaccgccagtttgttgaaaggtacgtgcattttcctggagctccgccattaaccggaaacaatcgccagcatttaactttacatctcttgtttgcactttcttcgctgtctttgcatcggacgcaaagacgaacccttgcctgctcatcccacagcatgaccccatataccgttttgtttgcaagtgctggtgcaagcgatctacgggccgtactaattcaatatggataaacccttgcctatcatcgatccatatcgtctttacttcttcatacgcttggatgaggccttcggaaactagaaatccaattgccatttcttgcaaatatgttggcgtacaaacaagcgtagcaaactcctcaccgttgattttcagcgttacaggctgttccctcgcaattggatcgtctatccgcactggctctcctgcctgaaaacgccatatttgtcttgatgtttgtatgtttttttccatcggcataccccttacttccttttccaaataagcggaagtgcgcaagcaagagcgcccgccgcaaacatgtaccactttccttgtgctggtcggcgctttggcgcattccgacgattaacaggctcggaacgctcgtgcatcgcttggttttcttctatgtcttcctgattgatgcccaatccttttacgattgcaagcaacacattcattccttcgatcacttgctcgtctttcaacgcgcggagcaaaccggcaaagcctccaccttggccctcaacgtgttcataatcggcgactttttcaatgcttgagttgattttataaacgattggttccaagtctgccattttcactgtacctaatgcttcaacgagtaataacatgtttttgagcgactgtgtcacatttggatgatcaagtgctatgacaattcgctccaatattttatcgctttgccctatcgcgccgtgggcgatatcaagcgcccccttttcgtggatacggccaaggagctttacggcagactcgatcgcctccttattgtctaaaaaaacgtcttctagctctgttaaatcgttttggcgcttttctgctgggtctatttcaagcttgcggatgaccgtcgtcgccttagccattgctctgcgctctcctttcctttactacatcgccaggaaatacataatcctttcgggcccacttttcttgaacgcgcacgcctatttgtggctgaggattgccatagcggtggtttgtctttggaagtgggtttttgccttgtggctctaacacttccaatttagctgcaacttctttataggcaggcgtgtcggtatctttgtctgaatgagagcttgtcaaataattgattgctccctctccgctcgtattcatcggcaaataaacttcttttccggcgactcgttccgtgacaacgcatcttactttcacgctgccgtatggcgatgtaagccgtacttttgtgccatccgtaatgccccggtctttcgcaagttccttcgatacttctaaaaatacttctggcgtttttccgctgatcgcttttgacctatacgtcagattgccttcatggaaatgttcaagcaaccttccattgttaacgtgaatgtcatattcatccccaaattcaagcggtttcgtccatgtaacaggatataggtgggctttcccttctggcagcgggaatttgtctttaaacagcaaaggtgtatctgtgccatcttctgcaactggccattgcaagctgttgtagccttcaaggcgatcgtagcgtacgccagcgaacaatggagctagcgatgctgcctcgtccataatttcagatggatgtttataagaccaagcggcaccaagccgattggcaatgtctcggataatcatccagtcagggcgagaatcgccaagtggttcaaggacttgatatagcctttgcacacgccgctccgtattcgtaaatgtcccttctttttcaaggctcgggcttgctggcaagacgacatcggcgaattgggccgttttcgaaaagaacacgtcttggacaacaaaaaaatccagcttttcaaaagcagcttgcacatagttggcatttgaatcgactatgcccatgtcctcgccttttagatagaggatattcaacttcccttcatggatggcgtcaaccatttcatggttattcaagccaggttctgctgggattttaacaccccatttttgttcatagcgctggcgcacctcatcatcgctaacaaattggtagccaggaaaccgatcaggcatgctgccgaaatcactagcaccttggacgttgttatggccacgcagcgggtaagctcctgcgcctggcttcatgtagttgcctgtaactaggagtaagtttgaaatggctgtgctcgtatcgcttccgccaccgtgttgggtaacgcccattgcccagagaatgcaggtagtatcagcctcgtggatggctgtagcgaccgcaatcatttcgtcttttgacaaatttgttgctttttcagcgtaatcaagtgtatatacggctaagctgtcaataaatgtttgcacattgttgacatgctttcgcaaaaatgcttcatcatgccaaccttggtcaatgatgtatttcgtcacagccgacagccaaacgaggtcgctgcctggtgctggcttaataaagacatcagcacgctcagcaagctcatgcttgcgaatgtcggcgacaatcactttttgtccatgtagcttttgcgctcgtttcacccttgttgccaaaactggatgtgattctgttgtattggaaccgattgaaataaccaaccctgcctttgcaatgtcttcaattccccctgaatcgccgccgtagccgacagtacgccacaaccctttcgtcgccggagactggcagtagcgagaacaattgtcaatgttattcgtgccaactacagctctggccaatttttgcatcaaatacgattcttcgttcgtacatttggacgaagaaataaaggcgagtgaatcaggtccgttctgatcgatcgcttccttaaatttacgagcaataacgtcgagcgcctcttcccaattcgtttctcggaatccgtccccttcacgaatcaatggttttgtcagtcgctcttcactgttgacaaaatcccagccgaatttgcctttgacacaagtagaaatgccatttgccggcgcttcaggctgtggttcgacttttaaaatctgtctcccttttgtccacacatcaaacgaacaccctacgccacagtacgtacaaactgtttttgttttattgatccgctcttctcgcatgatcgcttctacatcagaaacagccattaatgattggtagcctgtttctacattctttgtaatgttaatcatcggccgcattgagttttccttaatcgctgttaaataccctgcctcaccttccatgccaacttccatcattgcattgcacggacatacggttgaacaatgtccacagttgacacaagatgattcgtcaataggtgagtgcttgtcccaaataacacgtggccgttccaaactccaatcaatcgatagcgtttccgttacttgcacgtcttggcatgcttccacacaacgcccgcataagatgcactgatcaggatcatagcgataaaacgcgttacgctgtacttctgccttttttgaagaatgttccgtttcctggtgggtcattttcatttctttgaccgcattatgtatctcgcagttgccgttattgtaatcgcataccgtacaatacagttcgtgattgccaagaatgcggtccattgcgatcaattgagcctcatgcacgccagcgctttttgtatgaatcgtgtcgccaggcttgatgtctgtcgagcatgagcggacgaattcgccgtttacttctacaatacaagtgtcgcatgtttcgatcgcccctaaacttggatgatagcacaggctaggcacttccacctttttctccgctaaaaaggttaagagtgaacgtggatttgtaaccgtttcctttttcccattcaacgtaacttcgaactgtctggccaatttttattccccctctatttcctctttcctcccctacccgtaaaatcctgcaataaaacctagacatcttaaccgttttaaaatgaaaacggctgggtatacgggtaacgatgaaaggagggccatttatgtataacaacacactggccaagctagactctcaggcgaaacagaaacacgggctgctcgcctcttctcctctccgttattttcttgctgctatgcttgccggtgcttatgtgggcgtcggctcgatcgtgcttttttctgttggcgatccgttctatcaagttagctcaccatttctgtctgtcgtgactggcgctacgtttggactcgctttagcgcttgtgctctgggccggctccgaacttttcacaggcagccatttaatttttacggccagctcattaagcggcaccactacttggaaacaaacagcctcaatttggagttggagctttgtaggcaatttagtcggcgcactactgctctcgtacctcgtcttccttactggcatttttgctgatgctggcgcccatcattacatgatgtctcttgcggccgataagatgaatgcgcctctacaggagttgttatttaggggcatcctctgcaattggatcgtgtgccttgcgatttggacttccctccgagcggaaggcgacatcgccaaactttttctcatttttgtgctcatttttgcctttatcgcatctggtttcgaacatagtgtggccaacatgtctattcttggtatggctctattccatggcggcaatgatatggtcaccattggcggatttttttataatttgattcctgttacgatcggcaatgtcataggcggcgctctatttgtcgccggtgcttatgtagccattagccaaaaaaagaatgagtcgtcgcccaaacaagttgacaaaaaaagcggttaaaaccttacaaggttttaaccgccgcttacaggtggaataaaagccacgacatcccctgctgtcagctctgtcgattggctcgcaaactcttcgtttactgcaaccatggcgccattcagcgaatcaggagaaagcctatgcgtgtcaatggcccactctgtcaattcttctactgtccttccagcaaaatcaacttctgtttctgcctggccagcttgttcggctagcccggcaaaaaaaagaactttaatcatgttgtcccccttatgtataccgtttggtttcaagctgatcgccaatccacgaactgccgtcttcccaaatttcttttttccatattggcaccatcgcttttatccgttccattgcgtatgcattggcctcatacgcggcctgtcgatgtggtgaactgactgcgatcacgaccgctgcttcagaaatgtcgagaacgccgagcctgtgtacaatcgcgacatttgtacctggccacctttcgtttatttcagcgccaatccgtttcagcattttttcagccattgattcataggcgatgtattctagacgcactgtttttttgccattggtaaattcacggacagtgccgataaaagtcgcaatcgctccgcagtttctatcggtcacttggttgattacctgttggacatcaattggtttattggttaactgaaacactaaaaataagccccgctttctagaatttgctttttcatgtatgacatatagcgttgacgttcatcaattccaaaaacaggaaaatccctcgttctcttgttattgccccaatcgatggcgcattgtacatgttccaactcgagtagggactggtcgctgtcatcgcgcagcaaaacgactttcgggtacggagcgtttttccatccttctactaaaataacgtctggttgatcgataagcacttgaagctgcaacaattgcacaagcgtccattctcgctttttcgcaacgatttttaacacaccatctccctcgaccgagctcccattggctccggcaagaagaaatcggtcactgtctgtgctgcctgtaggtgctcccccatggccatggtgcttcaggcaagatacaaccatcccttcattgcgaaggaccgcgattaattgctccattaatgtcgttttgcctgcatttttgtagcctacgacttggaagatacggcaacgcttttccacggccattcacttccttgttgttcacctaaaagcaatatatccacttccatgcctgattgatagccacgcgtccctcctggcaacattatcaacacatctgcttcagcaagagaaatgaccgaccctgacttgtcaaggccagagggcgccactttatgaatgccatcttcttctgaaagaatgccgcgcaccaatcttgtaaatgggttcggttttggaaaatcaaccgctaaaattgctttactctttttcaaatgaatgttttgggcttgaaggctacgccggataagggggcggacaaacaattcgcagccaacaaaacaagccccaggattgcctgacaaaccgaaaaacggcttgccgccaacatgggccgcagttgtgacgcttcctggcctcattgctactttattaaaaatttgcttggcgcctaatgtctcaattaattgaggcacaagatcataatcaccgacagaagctcctccagttgtaataacaatatcgacttcttcaagcatgttgcgcactgcctgctcacacagcttaagatcatctggcagctgtccatacatgacgggctgcccacctgcttgccttacttgggctgcaatcatgtacgcattgctgttgcgaattttccctggggttagcggtgcgccgacttccagcagttcgctccctgtcgacaaaatgccaacggttggctgaacggccacaggcacgtaattgtatccgaacgtcgccagcaaagcggcgacgcctggatggacatagcttcctttttttacaaggggtgtcccctttcgtgtgtcttctccttgaaaagaaatattcgtgtttgctgcaaaagggcggacaacggtgatatagccatcgctctcttcttttacgacttcaagcatggctacggcatcacagccgttcggaatctttgccccagtcataatgcgcaccgtttcccctgctttcacgtctcctgcaaagacagttcccgcaccgatctcaccaactgtttttaaacgcactgggtttgttcggcttgcttgtgccgtatcaaacgaacgaagcgcatagccgtcgtaaggcgaacggtcaaaaggagggacgtcgtggtctgcaacaagatcagcagccaaaaaacgctgcgtcgcatctaaaagagggactgactctgtacgaacagggacatccatttcttgcaatacacgccttactgcctcttcaattggaagcggcaatcttttctccaccatttttcacctcctattaacctccaatataagacatctcaattttttttcttgtttttgctgtttcttctgtccgaagctctgaatagcgatcagcccgtgcttcccataattgcttgatttttagctgcaatgcctcgtctgaaagtcccttgcgcaaatcagcacgcaagtctgtgccattttccgaaaataagcatgtaaatattttcccatcagccgataggcgcgcacgagtgcacgattggcaaaacgtttcggtaaccgaagaaataaagcctacttccgtctctgtgccgctatagcgataacgggaggctacttccccgtaatacgcttgatttaccggttctaatggcgcaatttgggagacgagcttgtacaattcctttttcgataccacataggaaaaatcccagccattcgtttggccaacatccataaattcaataaagcgcaatgtgacaccaagctcctttgcataacgtgcaaggggaatgacctcctgttcatttgcgcctcgtttgactaccatgtttattttcacgccgagtcctgcatccttggcagcagcaataccgttaaacaccgcttgcggcttcgtcttacgtccgctcattttttgaaatgtttccgtggacaatgcatctaggctgatattgacccgttgcaatccagcggctttaagggctttcgccatctttggcaacatcacgccatttgtcgtcaacgctagatcttctaagccctctatagcatgaagtcggccaatcaaatgcgccacttcttttcgaagcagcggctctccccctgtaatgcggatttttttgacgcctaactgcacaaactgctctgctgtgcgtactatttcgtcaacagaaagaagctcgctttcatccataaaagcatggtctgggccaaacacttctgctggcatgcaataagagcaacggaaattgcaacgatccataattgagatgcgtaaatcttgcaatggccgctctagcttatcacaaattcgttggttcgccactttacgcctccttccttcctcacttacaataagtatgaagaagctatttccacaattttagtatagctgaagtggggggtaaaagaaaatgcatcatacgcacgatgtgccagtcgtaaaagttgccgtcctcacactatcagacagccgcagtgaggcagaagacaaaagcggccaaaccattcaatcactattagatgagcaccatcaagtcgtccgttacaaactgatcgccgatgatgcagagaaactgcaccagactgttacagaatgggcgcaagccgttgatattgatgcgatcatcacaaacggcggcactgggcttagcaagcgcgatatcacgattcaaaccgtttacccgcttcttgataaagaaatgaaagggtttggcgaattgttccgcgttaaaagttacgagcagatcggcgcaaaggcactccttagcaatgcactagctggtgtacgtgagaacacagccatcttttgcctgcctggctcaaagaatgctgttgcattcgcaatggaagcctttattgtgccgattttatctcatttagctggagaattgcgcaaatgaacattgccggccttgtccttgctggcgggaaatcttccaggtatggaagccaaaaactatttgccgaccatcaaggacttccccttgtcatgcgtagttttatcgcgttagaacaggctggcattgacgatgtttatgccgtaaccaacagtgccttagcgcctgcttttaccaacatcggggtgccagtcatttgtgatacgaccccttacgaagggccgctcattgcccttcaacacgcgatggaaaaaggaagtgctttagggcatgagtggttccaagtcttggccggtgacttaccctatgtccactcggctatgatcaaacagctcgtcaatcaagctcgctctactccgggcgctgatatcgtcttgccaataagcggcacgagagcacaaccgctccatgctctttaccatagacgctgcttgcgttattttcctgaactcgggcaggaagaaaagcgaatgcgtgctttatatcaaatcgcaacggctaaacatgtatctttttcagaagatgaacctgcatttaccaacattaatttccagtcagactggaaggagtgattcccttgagccaattctcacactacaacgaagacgggcttcctaaaatggttgacatctcctctaaatcagcaacaagtcggacggcgacagcagaatgccgtgtccggatttcgcctcgcctttacgaggcgatccatgaacaatcattaaaaaaaggaaacccattgccagttgcccaagtagcaggaatcatggccgccaagaagacggcagaatggattccaatgtgtcaccctatcctcatccaagggactgacctttcttttaagtatgaaccagtcaaagacggctacatgctcgtgattggcgcaacggttaccgttgatggcaacacaggcgttgaaatggaagcattaacagctgttacagctgctgcgctgactttttacgatatgtgcaaagcggtcgataaaagcatggtgattgaagaaacattgctcgtcaaaaaaacaggcggcaaaaacggcgacttttaccatccacgcagagaaaaaatggattaggattgaccctaatccattttttttaaaaaggtttgcacccattccacgtacttctgtttttgacaatctgcaaaatggtaaagaccagaagcgacacgaactggatcaccgaaaaaatagcgttcgtacaacatttgccgggagccaaattcgctaatgcttaggtcgcgagcaaggcggagcaatttcgttttttccttcgcgctcgtatattcgccgcgcataaaacgttccaatctcccagcgatcggcgaggcaaaatcctttttacttggcgctgagatgaagtggctcgcgccaagcaattgaatgatctcaatcaagcgcgcgtatgtcatttgaaaataacacgcactagcttttaacggttctagcttcggcaccatgatctcgtactcattggcttgcgcttgcgtttccgctgaataaacaaatccacgcattgcttccagagcgacaattacttctgatactttcccttgcacatgagtgtgttggcctatatttagtgtatcgacaagcgcttgggcaacgccgagcagccactccgttttaacgatttgcctgttcgccgcctgatacagcaaaaatgcttcaatgcctgttctcgcaaagagctggctcattagccattcatttctatacataaatacccgttcccacgggacaaagacgtggtcaaacacgacaaccgcatcgccctcttcaagagtagcagataaaggatagtcaaattgcgtttctttcccgaaagaaggcctgcttaaaaataggagcccttctgtatctgaggggacagtgcagccaaacaagtaatcgctatcgacaaatgcagctgatggaaggaccaacagttcgtcggtaatccccccttgtgtcgccaaaagccgggctccgtctatcacgactcctttttcgttttcctcgataatctttgcagcaacgggctgctcgacgctttctccgtcaggataaaatggtttcctgctaatcgatgggttcacaaacgtgtgcgtaaatgtatagtcgttctttacagctcgttcataaatggattgtatgctttccccatactcttttccatcttcggcaaagaaatcttttgcccctgccataattgcaatcattgtattcacgtattcaggagaacggcctagcacgcctaaagtcgattgcgcccacaattgagttgctttcctgcgcttcgttaagtctgcttttgtacgtggaatttcaaaagaaaaattagcgtttttgtcgcttgcttgcaaaatatctgcatagtcatcatccagcaccatatcgtacaagctcgcttttgcttctaacactgccttaaaagcaggatgttctgtgctttttccttttacgaattcaccatcaatccaaattgtgctttccaattgggcaattcgctttaaatagtcagcaccagtcaccattgccatatcaacgcctccttagacgatattagcctatgcgatggacacaatggaggtgtataacgacatgagcccaagcaaaaactagctaaaaagagaggagtggttgctatgcctgagatgcctgaaatggccacttatcaaaaatggcttacccgcacggtagtcggccaaatgatcacagacgtcgaggtaaaccgggagaagtccattaatgtgcctgtattcgaattgaaggcagcggtacaacatcaaatcgttacggaagtgtcacgacggggtaagcaattgctcttccacttggcaaacgggcacatgcttttgcttcatttaatgctaggtggctggatgtattgggggacagaggaggatgcgccagatcgaaccaaacaagtgattctctccttttcaaggcacaaactttattttatcgggctgcgccttggctacattcacctccatgaccaacaatctgctaagcccgttcttgctaaacttggtccagaagcaagcagcataaatgctgacgaatttaagaaaattgctaagcataagcgcacgatggtaaaaccttttttaacgaaccaagcccacctgtctgggataggcaattgctatgcagatgaaatttgctaccatgcaaagatgatccctttacggacaatcgactccctctcttccaaggaattagcagcattgcaccaagcaatcgcaccaacgctgcaagcggctgccgatgcgggcggctatatgagtcaccctttcacttcgtcagatcggttgacaggcggtatgaacagcaaactttatgtgtatgaccgcgaaggtgaagcttgcttccgttgcggcaatcccattattcgccaggaggcatcaaagaaaaacgtatttttctgccaagtctgccaacattagtggcgttttatgtacgtttgtcacaaaaatctacctgtacttcttagcttagatgtggtaaagtgtcctacggcaacaacgcagttcgagaccttcctgcgttatcaaaactaaggagattttgctaaatgcctacagagttatatgggttcatttttgccctcatcaattttttattgcttggtctattttataaagtattcggcaagaccggcatgatttgttggatcggctttgctaccatccttgccaatttgcaggttgtaaaaacggtagagttgttcgggctaattgtcacgctcggaaatgtgatgtatgcaactacattcttggctactgatttgctaaatgaaaaacatggcaaacaaacggcgcggacggctgtatggcttgggtttgccactttattcatttccactgtcatcatgcagttcgtggtccacttcccgccgcatagcgaggacttggcgcaagaacatctagctttcatctttgacttcgcgctccgtattgccgcaggcagccttattgcttacttaattagcaaccatttgaatgtatacattttcgcttttttcaaaaggctatttccaaagccgtcgatgctctggctccgcaatagtgcttccagttttattggccaagcctttgatacactcatcttttgctcgatcgccttcctcggcgtttactcgtttgatgtctggctcgaaattgctttcaccacgtatttaatgaaatttcttgtctcgttgcttggcatcccattcatctattggctgagaagcattaaaccattagagctgatcaagtaaaaaaaacaggactgattgagtcctgttttttacttacatatagtgaatttgatgtttgtgccgttccatcatcgcttcattatacgcgtcgccgccatctaaattagcgctgcggaagactgggacttcacggcctgcctcttcaagttgttcaatcatttttagaacgattgaatgaatgataaagctgccaacaatcgttgacgtcggagcgactttttgcgacaacgactttactgaaacagccgcatcacctggctcgccgcggttatccattaccaaatcgcttacttcaaacagccgcttcccagaagagtgacgggactcgacacttttagagtaagaaacgtttgtcagcgaaataacggtcattcctttttgctttgctgctatcgccatatcgaccgcaacaggatttctgccagacaccgaatggataaacaacacgtcgccttgtttgacaggctttgattcaagcaggatcgtcccgtatccttcaagccgttccaatttagaagtcaacgtgatcggttcaacattcagcataagcgctgggctaaaaatcggattaaacagagccaagccgccggcgcggtaaaaggcatcttcagcaataatgcccgcatgggaagcaccaaatagatagagcgacttgccttcctttatcgcatggaccatgatatcagcggcttttccgagaacctcttccccctcatcgaccgtttgccgtaagagacggctaattgactcgtaatattgctccacgtaagacattgatttcgtcctccttaaggaaagagtttggcaactaagtcaccaataaaagaccaaagcgagaaatcgtttccgccaaaaatgacgatccaatctgacaccgttccactcaacaccggtacagaaaggccgacaagtaaaatcatcacgacaccggctgtggctgatccagcaatcgctccttttaacccgccagttgcgtttccaataatagcagccgtgccaatttcaaaaaagcatgtaatcgtaaggggcacaatgacaaagctaaacaaaccgaggctgcccgtcacgaaaattgttgccaccgaggtaatcatggatacaataaacccaattagtacagcatttggggcaaacggaaacaaaatgggcgcatcgagtgctggaacagcattcggaatccatttttgtgaaatcccttggaatgctggaataatttccgcaagcatcattcgtacacctagcaacaaaatcgttaacccggcgccaaacaaaattccttgcatgaggctgtaaataaacaagttctgctccgccccaaacgctgttgaagcagcgtcgaacccgataataagagatacgaccatatatactaagaacattgtaatcgaagacgtaatgctaatttcacgcaagaattcggtagatttagggaattttatttcttccgatgattttccttttgtaccaaacagcattcccacccagccagaaacaagagataggattgtggttggatgcccaatgataaaatcatctgaacccgttactttgcggataaatgggcgcaaaagcgcgggcgctataataatataaagtgctgtcatcagtgaagcaaacaagattatttgcgtattgctaagagcgttttcaactccaacggctacaaagataaacggaaaccaaaacaacatatggccagttaaaaacacatgtttgattttcgtaaagcgtgcgacaagcaaattaatgacaaaagcaatgagcatcgcgattccgatttgcgtcccatattggcttaaaatcgtatcagaccctagcgcaggcgctacttctgcttcttggatgtcatacattaaattaaacccttctgttagcggtgcaatcgagcttgttaaaatatttgtcccctgtgttaaaataacgacaccaatgatcgttttcgccgttcctgagacaaccgtcgaaaaatcttttttcaacaacaacaagccaatcaatgcaataagcccaagaaaaattgctggttcccggatgatttcaataaaaaagttcataactccttgcatgggaaacccccctttttatgttggaaagcaaagcggccaaggcttaagccttgatttccgctgctgctttttctttgatctctgccttattgacaaaactgttaatgatcacaactggtttcccagctgactcctgcaacttttcccctaactctttgcttgtgaaaatatagtccgcaggcgtactttgcgcagaagcaacatctccagtaaacacatcggcttctatgcctaactcttttaaaacactttccaagttcatttttaggaccatggaagaaccaaggccaaacccacatactgtcataatttttaatttgctcatacgacacactccttatgaaataatttgataaacgtcctcggctgatttggcttcacgtagctgaccgactttttcttcatcaagcaaaagacgcgatagcctctcaattaagtgcaaatgggattctgctcccgtggctgaaaatgaaaagacaaggtcaactgggtcattctcttcattgccaaacggcacagcctcttttaagactgccaacgaaacggcgtccgtatgcaccgcctcactaggcctggcatgggccatcgccatcccggggccaatgacaatgtaaggcccgttttctttgacggaatcaaccatttgcttaacatactctgaagttaccgctcctgacttgactagcaaggaacctgatgcttcaatggctctctcccagtcttttgcttgaacgccaacagcaacatgttctttttttattagttcttctgtcatgttgcactcttcctcccaatccatttcgttataagctgctctcttttctcttgtgtttccaaatagcggaaaagctgcaagaaatcctggttatgtgcttctttaattgctagcacgatcacgacttccacacgttcagggttaaaagagccaaaatcaatttcatgttcaaatatggtcatgctaatgccttctttaatgacattttcaggtccggcatggacaaacgctacctttggcaagaacaccatgtacgtgccattccgttccacagacataatcatttcttgtacatatccttggcggatgtagccagccttgagcagtggtgctgctgccagagcaatgctttccttccagtcgctcgtgttggccgtatgaacggtttcgtcaaaaagcgttggctccacagctgaggcatgggcatatacttggttgaaacaagcgagctgtttacgattaatcatcttttgcgcttcatgctgaatcgtccgtttgtcttcatcatttaacaacgggcttacacggaaaattttcgtttcattccattgtttgatcggcagctcttgcgtggttaagacaaagtcgacatcgctttcttcaagggctttttctaaatcctcggtgttcaccacgttaattaaatggaaacctggctcagcctgttgcaattttgtcgtcaaaatggaagaagtagcaagtccagttgaacaaacgacaatcacagtcggcaaaaaccgtttgcttttgctacggtcaaaaccagcactcacatgcatcgtaataaaagcgacttccgcagctacaagcgtataccccatatccgctgtaatttggtggaccatctcgtaaatggcacgataccgaactttaatttcctctgtatacgggttgtcaataacaagcccttgttcgattctcaaaaaagccgctttcatgtgataaagcaaatcattcatcagttttttatcttttagcaagtcgacttggagaatggtagaaatttgttcaagcaaatacgtgcaaaaatctttttccttctgataactctcccctaagacagcgtcatttttataggaaacgactttcgcttgtccgagcaacgtgttcagaaatgcgtgctcgtgctcagcagtacggttatcgcatagcgcggaaacaacttcacttaattcaccaagtcggtgtcctgcttcgcgctcttcctgaggaatatacacataatggccgtgcaaaatccgctcataccaccaacaaaggaaaatcgtcaatacacgcaaagagccctcgctataaaacacttgccggtcctcttggcaagaacgaagccacctatcaatttggccgcgaccgccatccttttcacagtcaaaccaacgctccactcgctctaagtcaacctgtttgtccgtcagccaatgaaaaatggcccggcggatgctccgctccgttccattcaccaaaaaccctttacgtgcttgccttgccagctgtaaaccaaaacggtcaagtgtctcctcaatatcaggtaaatatttttgaatgcttgaccggcttaaatgaaattcatccgccagctgctggatcgttacggtctcatgcataatcgcaaacaagctcatcatcgcaatgtggacatttttatcaaaaaagacttgatggccttcggcaatacgaaacagttcagcacgcttttcctcaccaacatgcaaaaatacgcctttgccaggctctcgctttaacggggcacctgcctgttttaacatgtcatcaatcgcatctaagtcataacgtattgtgcgaccgctaacattttgccatttcgccaaaaactcaatagtgacatagtggttgctacggagcaatttcgttaaaacgcttttttgtctggacgataacatcttcatcacccttgctgtaatcatatcttgtggctgcctgtaattaaagagtgaagtttatcacagttgtggcaagaaagtgatggttgttgtcaaataactttacatctactaagccaaaaacaaaggatgttgaagctctcgttttcacaagtagttggcaaaaaatagtgtgcccattcatactaaaaaaaaccaaactagtggaaaaaaactagccggctcggaattagaataaaaagacaaaggaacctgttgatgtttagccagattcctttgtctctatctgttttgttttttagtcaatgtaacgctaactgcatgcggggactgcataaaaaagaggctgctaggagcaacctctttgtaggatggaagaatgccttacatcatgccaggcattccgccgcccattcctcccatgccgcccatgtcagcgccgccagcattttcttctggcttatcagcgataacagcttcagtggtgaggaacattgcggaaacacttgctgcgttttgtagagcagaacgcgtcacttttactgggtcaagaatgcccgtttcaaccatgttcacatattcgcctgtagccgcattgtagccaacgccaacctcttcagcttttagcttctctacgatgatagagccttcaagaccagcgttgtgggcaatttggcgaactggctcttcaagagcgcggagcacaatgttcacgcctgttgcttcgtcccctgtagcgtcaactgctttaactgctttaatcacgttgacaagtgctgtaccgccaccagcaacgatgccttcttctacagcagcacgtgtagagtttagggcgtcttcaatgcgaagcttgcgttctttcatttctgtttcagtagctgcgcctactttaagaacagcgacgccgccagcaagtttagcaagacgctcttgtagtttttctttatcaaattcagaagtcgtttcttctacttgcgctttcaattggttgacgcggccagaaatttgttctgggtcgccagcaccttcaacaatcgttgtgttttcttttgttacaacgacttttgctgcgcgtccaagcgattcgattgtggcagatttcaaatcaagcccaaggtcttcagtgatcacttggccaccagtaaggatggcaatgtcttcaagcatcgctttgcgacggtcgccaaatcctggagcttttacagctacagcattaaatgtaccgcgaagcttgttcaatacaagtgtcgcaagcgcttccccttcaacatcctcagcaataattaaaactggacggctttgctgtaccacttgttcaagtacaggaagcacttcttggatattcgtgatttttttgtctgtaataagaacgtatgggttgtcgaggactgcttccattttgtctgagtcagacaccatgtaaggagaagcatagccacggtcaaattgcataccttctactacttcaagttctgttgagaaaccttttgattcttcaattgtaataacgccatcgttgccgacacgttccattgcttccgcgatgatttgccctacttcttcatcagcagaagaaatcgccgcaacttgagcaatcgactctctgccttcgattggttttgaaattgctttaagctctttcactgcagcagccgttgctttttcaattcctttgcggatgcccattgggtttgcaccggaagtaacgtttttcaagccttcacggatcattgcttgtgcaaggactgtcgcagtcgttgttccgtcaccagcaatatcattcgttttgcttgctacttcagcaaccagcttagcgcccatattttcaaaagcatcttcaagttcgatttcttttgcaatcgtcacaccgtcattggtgatgagtggtgaaccgaatttcttttctagaacaacgttgcgccccttaggcccaagcgttacttttactgcatttgcaagagtatctacgcctttaagcatggaacggcgcgcttcttcactaaattgaatatctttagccatttgtattcgcctcctagtgtgttctttcccttacttagccaataatcgctagtacatcgctttcgcgaagaatgaggtattctgtgccttcatacttcacttctgtacctgcatatttagagaagatgattgaatcgccttcttttacttcaagtgccactttttcgccgttgtctgttacgcgaccagtgccgacagcaacaaccttgccttcttgcggcttttcttttgcagaatcaggcaaaacaatcccacttgcagttttttcctcagattgaatttgctcaatgatgatgcgatctcctaatggttttaacaaggaaaacaccctcctttgaagacgtatgtagtcttattagcactcggattcgatgagtgctaacacatttattataataatcattccccacttgttttgcaagggggttgcttgactttttttgtcgatttacaagagatttttattctaagtgctgttcactgaatttatggataaactatggtatgatgaagcaacgaaaatctgattaggctaaaggagttacgctgtgacaaaacgttatttactcgtcgtgtttgcttatatcgttatgcagactggtctggctattttggtaagctggctgctgattcgttactttgccatttccggcgccttgaacatcggcttgtcatccattattacatttacgattggtttaatcgccatcctccttattttacgcaaagacgaagacagaggcgggggccctcctggaaagaaagcgaccgttccagaaacaatcgcgtggtcgcttatcggtatcttccttgtatttgcgacacaaactgttgccggcttgattgaacaacagcttcttgggattgaccaaggatctgaaaatactgcgcaactggttgaagtcgcccaagattttttgccttttattcttgtggtagcgattcttgggccgattattgaggaactcgttttccgaaaagcgatttttggctggatttatgtccgcaccaatttttttgttgcggctctcataagctcgataatctttgctgtcatccactttgattttgaacatattttggtttatgctgctatgggtttttcgtttgccttcttatacgtaaaaacgaaacggattattgtacctattatctcccatatggcgatcaacagttttgtcgtcattgtccaagtcgtgtttgctgagcaactggcggagattatggagcaatacgagcagcagtcatcctttatccagttattcttttaggggtgccctatgacaaagtcgccaatttttataggtctatcgtatgtgttgcttggtgttggcttcattgcgctgacgtttattaacgtcaaccaaaatggttggggatttatgtctttttttaccgcctttatcgcagccgtcgatttgtacgtgggctggctcaaccttcaacgagggtttaaaaagaaaccaaatcaatcagactgaaagtaaagatgggaaaaaacgagggttggaaacatttgagtaaacgtgttgaggctgcacgcaggttacactcctgcttgcagcccttcgtttttttcttccaatttttttatggcagagaccacagcatccgctgatactggaaacggcattacatgaatggattcttctgcgactgtcgctttttcagcaactgaacgcaaatcagcttggagggaaatgcctaactgagttaatgaatatggaaggccaactttttcataaaatagccgcaatgcttcgatttcgtgccatttctcttctaacgccaattggacgagaatgccgtatgccactttgtcgccgtggagaataccatgtgtttccgctaaaaccgtcaagccgttatggatcgaatgggctcctgcaatccgtccatattggtccccaaatcctccaaccatgccacctagcataataatcgtttctgcaactttacaaaaagcagtgctcacttcgcctatgtcaaaagcgcgcaaagcttcatcgcttttttccaacaaaatgtcacgacatagtttagccgtataataagccacctctaatgctggggacttttcatccatcgaaccaagctggacatccgcttcgtaccattttgcaagcgtatcgcctatgccagcgacaaacagctcttttggcgcagtcaaaagcaagcgcggttcaagtaatagcaacgacgcattttctgggtaaacgtcgtagtgtgtataggtcccctcatctgtataaacggccgcaagcggcgtccaaggggcacaatttgaggctagcgtcggcacgagcacataaggccgtttcgtttggtaagcccctcctttgactaggtcaaggagtttgccgccccccacgccgacaatcgcatcgtactcgccgctttgcacaacagctgccagttggtccatttgattttgtgaacaaattccattgtattgccagtaagttgcctcaacagctgtaaattccggccaaaatcgttctgccgctttccaagaggcatcgccgtggaccactaaaacatggtgaaatcctctcgcttttagtttagtttctaaggaagacagtatcccttcttccaatacatattcatgtggtgctccgcgaacaacaagcgactccatccttattcctccatccaacttggcttgccaaagcctgcaaattctttatcgattacttcttcaaattcagcggactcaacaacctctttaatatcgttagccaactctccgtctgcatcttctgagcgaccagccacgacatttcgatattggtcaggcatgttttccaacttgattgcgctgtttaaatcaagtccagccgataaagcaaagttgccaggaacagccgtcaatggcttttcacccacttcacgtggcaattgagcagcttctagctctacgaattgaaggttcttttcattttcagtgatgtcttttacagagacagtcagcgggtctatgccatcttcaaatgaaatcagcccttcctcctcaagcattaagaacgctcgggctccattcgttgggtcattagggatagcgatctcggcaccatcttcaatttcatcaagcgaaccatatacctccgaataaatccccattggcgctgtcgggacagaaatcaaactagataactctaagtcattattctcggcaaaatcatctagataaacttggtgctggaataaatttgcgtcatctttgccttcagccaattcacggttcggaatgatgtagtcttgatattcatttaccgttacagtgtagcctttctcctctaaaccaggaataatggcttttgtaatcatatcgctgtatgggccagcggtagctccaaaccgaatttcttttgagtctccagcatttccactttcacttccacttccacatgcgccgagagcgaagatgacgcctaaacttattgcactttgtacccataatgtctttttcatcgtttctctccttcttttcctatctatttaacaaaaggcaagcttgccttaacgtttattttcttttatctgtcgcttttgcagtcaaatctcctataaactgaaatacttggacgagaatgatcaatatcaccacagtcgcaatcataattgtatggtcatagcgataatgcccgtagcgaatcgccaaatcgccaactccgccaccgccaatgacacccgccattgccgagtaagcaattaagctgataatcgtaagagtaagcccttgtaccatcgaagcacgcgcttctaaaaagagcacgtcttttataatcatccatggcgtcgcgcccgaagcgattgctgcttcaattaaccctttatctacttcccgcattgaactttccacaatccgggcaaaaaacggaatcgcagcaacagacaacgacacgcttgctgcgatcggacctgtcgttgtaccgacgagcgctttcgtaaagggataaagggccacaagcaaaatgataaacggaatggaacgaacaatgttgacaataaagcccaaccctgattggacaagttgattttcccagaataagcctcggtcagtcgcaaacaaaatgacgccaagtggaaaaccaacgattatcgccacagctgttgagatgctgatcattaacaacgtctctacaaaggcgttccacatatctggcaacatctcaactaaatgcacgaagtccatcgcggatcacctccacttcagcggaacgttgcttaatataagcaattgcttcctgaatcgctgttggctcgcccttcagttccataataaaaatgccaagcgggcggccgccgatatattcgatcgctccatggagaaagtttccttttacagaaaactgttgcaatgtatccgagataatgccttgttgggcaacgctacctttaaagattactttagcaatcgtgccagaaaattggctcaatgtatgttcaggaatatgaaaagagacgacatctccaataaactcttgtgttaacggtgcttttggcgcagcaaacacatcatacacatctccctgctcaatcattttgccatcttgcataatcgccattttatggcatatttctttaacgactgccatttcatgggtaatgagcacgattgtcaaccctagttcttcgttcaacttttttaataacgccaaaatcgatttagttgttgttgggtcaagcgcagatgtggcttcatcacacaacagcacgcttggtttgttggctagcgctcgggcaatgccaacacgttgcttttggccgccagaaagctgcgctggatacgcattgcgtttattcgaaaggccaacaagctctagcagttcttccaccctggctggaattagatccgctctcacgccagcagcttttaaagcaaaggcaatattgccgaataccgttttttggttaattaaataaaaatgttgaaaaatcatgccgatctttagacgtgcttgccgaagctcgcgtgtacctagtttggtcaaatccaagccgtcaacacgaatcgtcccactcgtcggccgctctaataaattaatacagcgaagcagtgaacttttgcccgctccggagtagccaacgataccaaaaatctcccctttgcctactttaaaagaaacattgtctacgccgataacacgttttttctttgttttgtatacttttgttaactcgcttgcctcaatcatcggttctccactcctacataaaaaagcttctctcatcatcatgaaagaagctgcgaaaatccgtttccgtttttccggcttatctttcagaatgatcccattctgcaggaattggcaccttccccgtaacgggaggttgctggacgtcattgggcctaatccctcagtcgctcttgataagtccttttttaattgatgtaacccgtatattacgctttttaaacaaaattgtcaaaacatttatcggcagcaacgccaaaaacacgtttttcaatgtgaaaaacatgttttggttttgtatgtttgtttcatttagcactttcttggccattatggtcggtagttccatggtattttcggtatgtaatcgccgaaatggtaatgctgatctcatataaaataagcatcggcaccgtaacaaacagatgcgacgttaattcagggggtgtaataatgccagcgatcacaagcaaggcaaaatacgcgtatttacggattttccgcaggaatgctggcgtgaccactcctagcctcgttaaaaacatcacaactaccgggagctgaaacaaaagcccaaaagggatggtcagttggaacaaaaatgaaaagtattcattgattccatacatctcatttatttcgaggcggtcggccatttgccccataaaagaaatgacaaaaggcaataaaataaaataggaaaaagcaattcctgccaaaaacaataggaacgcaattggaatgtacgcgagcgtcgctttttgttcgttttcttttaatcccggtgaaacaaaggcccataattggtacaagatcactggaatgataagcacaagcgctgttatgacagcaaagttcatatagacacgaagcgggtcggtcaatcgaaaagcattaaacggcatatcagcggcttggggggagttctgcaaaaacgtaataacgggaaccgccaagaaaaaaccgccaataagcgcgacaataaaaaaggcgaggaccacaaaaatcctgcgccttagctcttccgcgtgatccataatggacatgtcttgcatagggacacgcccttttctgcctttacgctttttctttttggacgtttgttgatttggtgtcatcatcgtcatccgctaatcctttggtagcatttttaaactcacgcaatgtgcttcccgctgcttttccgagttccggcagctttttcggcccgaaaattagcaatgcgactagtgcaattaatacgacactccctacagaaagtcctcccattgttgttgcctccttcttatagtgggtaatgctttaaaaagtaaacaagcgcctgcagttccactgcaaggtcaatatgatgaacgcgaatatgggctggtacggataagcgcactggggtaaagtttaaaatcccttcaattcccgctttaacgaggcggtcggcacttttttgtgcctgggaagcaggcacagtcagaaccgcaatcgaaacattttgcaacccaatttcttcaagcttgtcccagttatacacaggaacttcgccgacttttgtaccaatttttttttcatcgacatcaaaagcatgggtgatcacggtattgttgttttttgaaaaattatactgcaataatgcagttccaaggtttcctacaccgactaaaatcacgtttgtccgctcatcttggtctaacgtctccctaaaaaaagaaaggagatattggacattatacccataccctttttttcctaacgcgccaaagtaagaaaaatctcttcggattgttgcagaatctacttttactgcctggcttaattcagttgaagaaacccgctgttttccggcagcatgcaagctttcgataaagcggtaataaagcggcaagcgttttgctgttgcctgaggaatcttcagttgttctgatttcatgtccgcccctttctgagctttggctgctggcgcagcatgattcaactctattgtacacgattttcgctaaaatgaaagagctctcattatgaacctttattgttgtttcgatctaaattgatgtacacttattaaagaacttattatgaacgcgaggtttgctttttatgattgtactacaatgcgtaaacgtatcaaaggcttttggcacagaacctgtgctcgaacaggtgaaattagaagtacaggcgagagatcgagtaggcttagtcgggcgaaacggggcaggcaaatcgacgcttttaaaaataattactggtgaaatgagccaagatacaggcgaaatcgtcattccaaagcaaacaacaattggctacctagcccagcatacggggcttgcttcaaaccgttctatttgggatgaaatgcttgaagtgtttgcgccgctgttggaaatggaacgctcactgcgtacgttggaacagcagatggccaatccagaggcgatagagcaaaacaattaccaaaaactgctttctgaatacgaccagttgcagctcgcttttaaagattccggtggctaccaatacgaagcggatattcgcagtgtgctggctggactccattttcatcattttgattacagcacagccatttctacgcttagcggcgggcagaaaacaaggctcgctttagccaaactgctcctttcgaaaccagacattcttgtccttgatgaaccaacgaaccatctggatatggaaacattgtcttggctcgaacagtatttggctaactactctggggcaattttagtcgtatcccatgaccgttattttctggacaaacttgtgacgaagacagtggaattatcacggggcaaaacgacaacttttcacgggaactatagccattacctcgacgaaaaagcaaaacggtatcaacaagcagtcaaacaatacgagaaacagcaagaggaagtcgccaaattagaaacatttattgccaaaaacattgcccgtgcttcgactacgaaacgagcccaaagccgaagaaagcaactcgaaaaaatggacatggttgatcgccctgatggcgataaatcagttgttttttcgtttaacatcaacaagcaaacaggaaacgacgtgctcaccatccgtgacttagctgtcggatacggacaagacacagtgtttgaaggcttgcatctttcattaacacgaggtgaatcagtcgggttaattggtgaaaatggagcaggcaaatcgacattattaaaagccattacccaacaactctccccacaaaaagggtcgatcatttacggcagcaatgtcgttattggctactacgatcaagaacaagcaaaactgtcgagcaacaaaaccgttttacatgaattatgggacgagtatcccactactcccgaaaaagacatccgcgcggtgcttggccggtttttatttactggcgacgatgtcctcaaacccgtttcctcactaagcggcggcgagaaagcccgtgtcgcactcgccaaattaatgatgcagcaagccaattttctcattttagacgagccgacaaaccatttggacttggatgctaaagaagtattggaagccgcactgctggactatccagggacaattttatttgtttcccatgaccgttactttattaatcgcctagcgacgcgaatcatcgaattggatcaaggtgacacaaatgtttatttaggcaattataatgattaccttgaaaagaaacggcaaaacgccgagcgtgctgctttgaagaaagaagaaaccttaacaaagcaggcagcggagacagatagaaattcgtttcagcttgataaagaggcgaaacgacaagagcggcaaaaacaacggcggattgaagcaatcgaaacagaactggaacaaattgaagcgtccatttccgctcttcacgaacagcttgctgacccagacgtttataccgatcatcaaaaagcgcaaacgatccaagccgaactcgagcaacaaaacaacgctctcgaagcgttaatggaagaatgggaaacactatcgacataaaacaaacagcctagagttcataggctgtttgtttttaaaatgaggaaagcggcaaccctggccgtgcattcatagccatattcccagcaatgccacgtaaccacatgctgtgggcacaagcgccaatcatcgcagcattgtccgtacatagtgatagcggtggaaccaacaacgttacgtctttgttggcaaacgcttctgtcaatgctttgcgcagccccttattagcagcgacgccaccggcaagcacgacttgtttcacgttaaattgcgcttgcgctcttaccgttttagcaaccagaacgtcaaccacactttcttgaaacccttttgcgagcgccgcccgatcggttacaattccccgctgcttgtcattgttcagccggttgagcacagccgacttcaagccgctaaagctaaagtcatagctgtctttttcaagccacgaccggggcaagtccagagtcgcttcagctgtatcggctaattgctccacattcgggccccctgggtaaggcaaagcaagagctcttgccactttgtcgtacgcttctcccactgcatcatcccgcgtttgcccaatgacttggaattgcccgtctttctccatataaatcagttccgtgtgtcccccggaaacgactaaggcgagcaacgggaactgtagcttcgcaacgagttggtttgcataaatatgcccagcaatatggtggacgccaattagcggcaacccatgggcaaacgcaatcgctttggcagcatggatccccactaaaagagcaccgacaagacctggtccctcagtcaccgccacagctgttaagtcctgataagtcacctttgctttttctaacgcttcctctacaacggcagtaactacctctacgtggtgcctagaggctatttcgggcactaccccgccaaagcgggcatggctttccatttgtgtcgcaacaacattcgagcgaattgtatcgccattttcaatgacggccgctgccgtctcatcgcaacttgtttcaattgctagtatcgttgtcatttagcttcacccacatgacccacgcatcttcttggttgtctgcgtagtagttttttcgaattccagcttttcggaaaccgagtttttgatacaaagactgggctggcgtattcgatacgcgcacttctaaggataggctcacgacgcctagtgcctttaaccactccatcacgtaacgcattaagctttctccataagaatggccgcggtattccgaagcaactgccacattggtaatttgcgcttcatccaccactttccacagtccacagtaaccaacgactttcccgtctacgacgacgacatagtaacaagcaaattggtttttcgtcagctctgtttcaaaagcttcccgttcccacggcgtcgtaaaggcatcacgctcaatcagcagcacctcgtcgatgtcgtcgagcaccatttgtctaatataagccttcgtgtctgtccttttgggcacgctgccagttcacctccgcctccgcttggcgcaagtatgttggctcaaacgcatggacatgttgaacaggctcccgcttgctcgcaagcgcacaaagctcgccaggccgtgcatcagcaagcatcctaggggcaaatacagcctgttccccaagggctgccacgatcgcttcacggtgaagacgggcatcctcgccgacaaacaaaaatgggccatcgagcgtttgcaaatcggagagccagtctgttaaagagctatgtcgatcaggcagttccatcattatgtctcgagccccaccgctgcgataagcacctgtaaacaccgtttgtcgtctcgcatcaatgattgggacaacatagccatgaaaataagcacctgcttgtgccataagctcaatcgttgaaaccgccacaagcggaaggccaagcgtccaagccaatgtcttcgcagctgttgtcgccatccgcactcctgtatacgaaccgggacctttcgccacagcaatggcatcaagatctgttggctttatccctacctcttgtaaaagagcttctacagcaggcataagccgcaaagcatggttctttttcaactgtgtcatgtattcccctataacggtatcaccatcacttacagcaacaccgagcttataggaggatgtatccattgctaaaatttttgccattgcacaagcccctccaaacgtgtccgattctcctcgccaacgggttttaggataagctcccttttcgtttcgccaagcaaatgaatcgaacaggcaaaccggttgttcggaagcgcttcttccaaaaggctcgcccactctacaaccgttacgccatccccataaaaatattcttccaaccctaagtcttgaacttgcccttctgctcggtatacatccatatgataaaagggcatgttgccctcatattctttaataatcgtaaatgttgggctattgacgacaccatttacgccaagggcaacggcaatgcctttcgcaaaatgggtttttcctgccccaaggtcgccatcgagcgtcacgacatctccaggctttaacatgcttccaagtgccgctgctagctcaatcgtttcctcaacagaatttgtttgtgctctccagacagtcatgtcatcacctacgtttaaaatgattgtatccactcatttgcagcgcttgttcacctgtttcagaagccaataaaaccgctggctctccggcgcgcacaaaccctattttatataaatgccgcccttgctgctgtgctgcttcacagcaagacgaaaaggcgctatcagtcattgtccctaccaactggaaatcctctccgccattcaaactccattttacccttttttccggcaaaacagaatccatttgcggagaaagctccaacactttctgttgatccaaaacgagttggacaccgctcgcttctgcaatttccatactctcgctcgcaagcccgtcactaatgtcattgagtgccactcgataaggttgttcagccagcatcttccccatttccacttgtgggactggttcttgatgcatgtgcacataccgtcgttcctgttcagtaaatgccccaaaccggccgcgctgatcaagcaactccaatccagccgcagatcctccaacaggccccgttacaaacacgacatctcccggctgcgcttggtttctgaaaagagcgcaacctttcttgacacgtcctattgccgtcacagaaagaacaagcgaatcttttatagagactgtatcaccgccaattaaatccatcccgtaacgatcgccaactgccctcattccttcgtaaagggatgttagttcttcagcactccaatttggcgggatcgcaatcgaaaccaaataaaattggggaacggctcccattgccgccaagtcactgacattgatcgcaagtgctttacgaccaatttggaatggacttaacgtgtctttacgaaagtggacaccttctaccatggcatctacacaaaccacttcatcccaagcatcctgacctgtataaacagccgcatcatccccaattccatgcgttagcctctcctggtatgtttcccgcggcacgatgctgcgaataaaggaaaattcatcgtccatgtcagtacccctttctttaaaaggctctaaaacagaaaaaagccgagacatcagcctcagcttttggtattgcgggggacggatttgaaccgccgaccttcgggttatgagcccgacgagctaccagactgctccaccccgcgtcgctctaaaaatgttgattttctggtgctactgtttgaaagaggactgtctcttcctctgcttgcttatccggggaggtttttgcgtcgagacaactcgctttcgctcgttgctccaccccgcgtcgctctaaaaatgttgattttttggtgctattgtttgaaagaggactgtctcttcctctgctagcttatccggggaggtttttgcgtcgagacaactcacttcgttcgttgctccaccccgcgtcgcttaaaatattgtagtatttcactactagtatttccgtcgacaacaattaatataccatatttattttacaataacaatgatttttttataaaaaaagaagctaaattagttgcgtttctttgaaaataggagtatagtaaatttcaagtctttttcatgacagttttgtgacaaaaaggagatgattttatgaaacgagcattccgtatgatcctgctcacacctgtcgcgcttatacttggaattgttctcttgccagcactagttgcagtggatttaccaatgtttacccagtttattgattcgattgtctcaggcaatcacagatcataacttttttgcttggctaccatatttaaaaacggcggataaatccgccgttttttagttttttactgttatttatagcaagcttttccttaccgcttcctgaaactcggcaataatatttcggccatcttcaattcctactgaaattcggataagatgggtaccaatatttaatgcttttcgcatttcttcaggaacagaccggtgagacgtatttaatggatacgaaatggacgtctctacaccagctaatgttggtgcaactttaacgaaagtaaaagcagaaaaaaagcgttcgacattagccttttggtcgagctcaatgctaacaatcgccccgtttcctttttcagagacaaatggtggatagtaaacatgcttcacaccatccgtctcttgcatcgttttagcaagttcggccgcattttggcattgcctttccatgcgcagagcaagcgttttaagaccacggcaggcaagccacgcttcaaaagggctcaagttgcttcctaacgcaatcacgcgggccctcgcttgatcaacaagctcctgtctgcctacaattacaccggcagttacatcactatgaccgccaatgtatttggtagcactatggatgaccaaatcggcacctaacgtataaggctgcaacaaatatggcgtcgcaaacgtgttatcaacgattactaaaaggtcatgccttttagctgcgtcaatcaaatcctccaagttctctactcgaacaagtgggttggaaatcgtttcggcaaatacaccctttgtattgcttttaatagaagcttcccaattctcgttcggatggacaaaacttacttcaattccaaataaagaaagctctttctcaagcaaagcataagtgcctccgtagacatccatcgtcgcaattaggtggtcacctgttttgcaaaaagctaaaatggcacaaagaatagccgacattcctgaagaagtagcaactccatcttctgcacattcaagcaaagctacccctttgccaagatcatcggtattcggatttccataccgagtatacaaataatccttctcgcctttgaaatattgctccatatcagctaaatccttaaaaacaaaggctgaagtttggtaaataggccgtgctttgctttgattttcccctttttctttttgcaaaaaatgtacagattttgtgttaaaaaatggttccacgtttctctccctctctcctatgctcttacattccatccaaacaaaaaaccaaacagcgagccaacaatcgatataaccaggtaaatcatagcttgtttacgctttttgaggcgccatagctctaatgcttccatgcaaaaagttgaaaacgtcgtaaatccgcccagcatactaataaacagcaactcaatcccttctggcaaaggcttggccaaaatccatcctaacatcgcacatccacttatattgatgacaaatactgccgtcattaattgagcgttctttccaaatttcaaccaacactcacttacagcaaaccgtaaacacgctccaactgcgccgcctattattacatacatcatcttgtcctccctcttgctcctaaaacgaatccaagggcgacaaagcccattccccctgtaacagtggccaacaaatacacgcttcctccaagcagatgaccgttttgcaacatggcgatcgtatcagccgcaaacgtggacatcgttgtaaatccaccaatcaatccgactgtaatgcctttttttacagcaagaggaatagacttttttaactgcaaaattggagtgagaaaacctaaaagaaaacacccacctagatttgcagtgaaaattccccatggccagttgtgaaaagggaagataatcgttaagataaaacgaaaagcaccaccgagggcgcctcctaaagcgacagcgacgtaggtatagacgagtttcacgtaattgccccattctgtaagattaaaccgattttactataagtccattcctttagacaacttgttttgaatggcgtcattcattttcccatatagataaactgatactaatgaagaaggtgataacatggatattattttactaaaattaagcgccgccctgttttcagggttcctgattggcattgaccggcaaatcaagcataagccactcggtttaaaaacaagcatggtcatctgcatcgcaagttgtttaataaccatcgtctcagtagaagcctacatgcactactcatctgctggcgagggaacgcaaaatatggacccaatgcgactcgctgctcaaatcgtcagtggcgttggtttccttggggcaggggtcattttacggagaagcaacgatgttatttccggactaacaacagcagccatgatttgggccgcatctggaatcggcattgccattggcgccggtttttacgttgaatcgcttatcacagtcatactcattctcattgcagttaacttaattccagctttgttaaagcacatcggtcctacatcgctaagtcaagtcgatgttgctcttcgcgttgtcatgtttgaagaagcagactccacacacttgattaaacaactgcaacgaaaagaaagtacttggaaagaacggaaacaaagaaacatcgtcattcgcgacgtgaagataaaagatgttgaccaaggcggccaacaactagacatggctctttctattccaagaaccatgtatatgacagagctatacgatcgggtcaagaacatcgaacatgtgaaatcagtggctgttgaacaacggtaatagaataattaccaagaacagctagcaattcttcatggaagtcccattaacgagttagatgaaactattggcgtggccattctggcgaatgcaaatagccatttatttggaacggcgttaatgtgaccgacagttaggctgccaagacgagaacaattggttttttttcataccaagatggaatgaacactttgctatctacgatgaaaggcagccgtggcatccacgatacgaaaatcgatgacaagccgtgcaaccatgctttagaggggtatgcagggacgtacactcacactggctatggagaaatctccatagccttaccgtccaaggcaacgcaccacatggactatcatggccacatctcttcactacaatatttttatctctttttttaaaaaagcgagtcgacgctcgataaaacagagcctttcttaactgctgggtagagtgaggcttgtgtttactctacctattgactcaagatgctgctttatacaaaatgggtagttctcaaagattccaagttaggaagtgcgaaaatgagggtgttagctagaaaaaacacaaaattttttagtttattggcggtatttattataactgttgtccctaaagtcggtgtatacattaacactaataattacaatactattaggtatgatctcggttttcctgctacatggctattcagtaacacaacagtttaattttgcagatattaatctgatagggctcgtactcaatgttgcctttttttacttattttttgtgttcgttgatatgggtattaaaaaaattgtcaataagcttagaagaaccgactgaatggatagcgcggaataaagggcagagttgctgtatggttgattctgtatgtattttactgcgcagcagcactcttttgcttcctgcccataacaaaaaaagacacctattcaggtgtcttgctgttgcccggcaacgtcctgggtccgggatcttttcctacgggagagttgagcatgaagctttttcaagatgtttttcatgttgttttacgaaaatgatccctacgtctcgcaggagggcacgaggcttttccagtgaagcctattcacgtagttttttatatgagcttatctccaaatactcctaataagcatttaactctgcttcttcgaagcagccctcttttgcctcctgcaaaaacaaaaaagacacctattcaggtgtcttgctgttgcccggcaacgtcctactctcgcgggaggaagcctccaactaccatcggcgcaaaagagcttaacggccgtgttcggcatgggaacgggtgtgacctctttgccattgtcaccggactctacttcagataagcttcggatttcttcgtccagttcgtgtctctcagtcggtcacgtacgtttgggtacgctcccttcttcgagcactcctgtcctcgaactcctcgcttctcttcgtagttcttttttgacttcagataagcagcgaatcgcttcgtcttgttcgtgattcttcttcagtcacgtacgcttgtacgctccttcagtcgaacacttccgatcctcgaccttcttgcttctctttgtcaatcgctttgcttcagataagcggcgaatcgcttcgtctgcactgaaaggtatggaaagaatcagtgattctttcaaaactaaatccgaaatagactcaattgtcaagaatgtgtataggataagtcctcgaccgattagtatcagtccgctccacgtgtcgccacgcttccacttctgacctatcaacctcatcatctctaaggggtcttactggcttacgccatgggaaatctcatcttgaggggggcttcatgcttagatgctttcagcacttatcccgtccatacgtagctacccagcgatgctcctggcggaacaactggtacaccagcggtatgtccatcccggtcctctcgtactaaggacagctcctctcaaatttcctacgcccgcgacggannnnnnnnnnnnnnnnnnnnnnnnnnnnnnnnnnnnnnnnnnnnnnnnnnnnnnnnnnnnnnnnnnnnnnnnnnnnnnnnnnnnnnnnnnnnnnnnnnnnactcaatgtcaagaatgtgtataggataagtcctcgaccgattagtatcagtccgctccacgtgtcgccacgcttccacttctgacctatcaacctcatcatctctaaggggtcttactggcttacgccatggactctcgcgggaggaagcctccaactaccatcggcgcaaaagagcttaacggccgtgttcggcatgggaacgggtgtgacctctttgccattgtcaccggactctacttcagataagcttcggattttttcgtccagttcgtgtctctcagtcggtcacgtacgtttgggtacgctcccttcttcgagcactcctgtcctcgaactcctcgcttctcttcgtagttctcagataagcagcgaatctcttcgtctcgttcgtgattcttcttcagtcacgtacacttgtacgctccttcagtcgaacacttccgatcctcgaccttcttgcttctctttgtcaatcgctttgcttcagatgcggcgaatcgcttcgtctgcactgaagggtatggaaagaatcggtgattctttcaaaactaaatccgaaatagactcaatgtcaagaatgtgtataggataagtcctcgaccgattagtatcagtccgctccacgtgtcgccacgcttccacttctgactttttgcttcagataaccttcgtatctcttcgtctggttcatgtttctcagtcggtcacgtacctttgtacgctccctccttcgaacatttcccatcctcgatctactcggttctcttcgcaaaaattaaaaaatacataaaaaggtatgcattgaattcttgacgtctcgttcaaacagttatacaaccgatgaacaaagatcaatttgagttatttctggattcagttttcaaagaacctagtaaatggtggagcctagcgggatcgaaccgctgacctcctgcgtgcaaagcaggcgctctcccagctgagctaaggccccattttgttccgtttatggtgggcctgagtggacttgaaccaccgacctcacgcttatcaggcgtgcgctctaaccagctgagctacaggcccctcttttgacatccctaccttaaatacacattattaaagtttaagttgtatctaaaagtatggattagtcaatacatatggggaaaatattaatggaacaaatgagagtattgagtcctctcaaaactgaacaaggctactgatttcaattacatcatgtaacacttctcagtttatgcttcgtgctgccttgcgacgagtaaccgcaggagcaatagcatttaatcgagagttttgagtcctctcaaaactgaacaaatagcctaagcgctatatgaccagaaagtcatacatcgactagagtaaaaactccatagaaaggaggtgatccagccgcaccttccgatacggctaccttgttacgacttcaccccaatcatttgtcccaccttaggcggctggcnnnnnnnnnnnnnnnnnnnnnnnnnnnnnnnnnnnnnnnnnnnnnnnnnnnnnnnnnnnnnnnnnnnnnnnnnnnnnnnnnnnnnnnnnnnnnnnnnnnngatcaccctctcaggtcggctacgcatcgtcgccttggtaagccgttaccttaccaactagctaatgcgccgcgggcccatcccctagtgatagccgaagccatctttcaccctctctccaggtggagaaagggattatccggtattagctccggtttcccggagttatcccagtctaaggggcaggttgcccacgtgttactcacccgtccgccgctaacgtccgggagcaagctcccttctgtccgctcgacttgcatgtattaggcacgccgccagcgttcgtcctgagccaggatcaaactctccgttaaaaagtttgacttgctcattgcacaaccgaagttgtggctcactatgattgacgagataccttgtatctcttttacgcttggcttttgttcagttttcaaaggactcgtttgtcagtcgttttttagcgactttcctatcatacaaattcccaccgaaaaagtcaactacttttttcataatggtgggcctgagtggactcgaaccaccgacctcacgcttatcaggcgtgcgctctaaccagctgagctacaggcccagaaaatcacaatctactaaaacattgattatggagcgggtgatgggaatcgaacccacatcatcagcttggaaggctgaggttttaccactaaactacacccgcatattttattaagcaattccctattaatccctgtcccgaacaccatgcctcttcctctgctcgcttattcagcgatgttgatgcgtcaaggcaactcggagactattcgcagatgtttcgctcgtggctgaggttttaccactaaactacacccgcatatttaatgtaagacatttgacgttacagatggtcgggaagacaggatttgaacctgcgaccccttggtcccaaaccaagtgctctgccaagctgagctacttcccgcaatggcgcgcccgagaggattcgaacctctaaccgcttgattcgtagtcaagtactctatccagttgagctacgggcgcttgttgtcattaaattgttttcgctagctcgccagcgacaagtaataatatagcataatcattctgcatagacaatacttttttaaaaaatatttattacaacgcaaccgtaacactaactgttattataccacattttatatggatctacgaatatcatagtttttattatgatttaaacaaaaaagtggaaggcttttcctgccgttatttaagcataagccttccctagcctctattgcttgacactatgagattaaacttagaaccacagtaaacattatccccatttaaggacaattgacattgcgcagcaattgccgccttcactaatgaccggagacgctagctggaatacaatgcctgttggtgaaaacttaatgtcgttgacagccgttaaccctggaacagattgaatcatgtgctgcacggttaggtggtcgctcttttgcgcagcttccattaaatgcttcgcaaatggccgatttcctaattggtgcaacaggagttggccctgtttaagcaaaaactcaaactgatgaacagactccgtcaattcagtcgtatcaaccgggggaaattgcctgtaacacccagcttgttgtgggcattgctgaaaagcccatcgcttatagtcgttcatcttctcttcctttcacatcgcatactatcttacatttgtatgcatatatgcctatccaagctacaaaggaaagaaaggaacaaactaggctttacttcttagttctattactgctgtgcaagtgcaccaatcgttgataagataaaaacagcaacagccaaaatagcaaatagcagccaaaacttaggcatttttttctttttaatgccacggtacacgagtccgcatagccatgtgatcaataatgcaatcaaacatgcccctaacaatctaccaatcatataaccgattacataacccatttccttcgtttcccctcacgttccatcttttataagaaaattatacagaagaccaaaaccagttgcctcgttagctactaaaagaataattgatataaacccgtttcatcatcaattgcttgcgctcgctcaaaagctgtcctttttgtactactattatttattagttcatacataaacattaacacgaatagaagagaagcatttccatccacatcatcctttggcgcaatgtatgattccgctttgccgtgtttaaacgcttctgctagttttttatctcctaaagtacaacctgtagccacgacgtgaacgccctctagatgtgcatgctgcaacacttgtgcggctccgaaataacaggaacgatgttcattttcttcataaacgtcttcagccaattctggcaatataaattgcccttcttctccatgaaaacataaaattagatattcgcttttgtcccttgtttttcctgataaaatgccaactaagtcattgggcctccctatccagtgcatatgtacacgcgctccataatactcaaggacagaccgtaaggagaatgcttccaattcacaatttggccctaccgctagtgtgatacgcatatttggctcgctcaatacgaatcatctccatatgaaattgtttatgcattgctattgtaattgaagtttattgaatttgaaagatcaagtagttgaccattcaagggaagccagcggatttgcccgctagctatcggcgatttttcgtccttacattttgtcgctaatattctccgtttcgagcatttctttgagcccactaaacatcaaactccagccatgctcactctcatcatgataccctcttagcgctttttcaatatccgcttcaagaataaacaagtttatggcagtgaatcgtagatactagcagaataggctgtaatcgcttcgtcgtaatctggatagttgtagccaagactggccgacaatcctttcgagtattttctaaaaagctcataacaagtaaataaagattgccacgtttctgcgtagcccttctcacaataagtcgaaagcagtgcttcccaatcctctttaggaagatagcgatcaataaatttataatttttccccacactaaacgtatatcctcgctctgagcccacgtaccaagccatcattctcaacaagttaggccgagcaattccatttaaatggtcgatagcaaagaggatttcctttctggctaatcctttgactacataggtggaaaccatccaaaattcattgcaacaatcatcaaattctctttctgttggcttttttagccaatagtggcgatcatcagcaacgatttcgtttttgacgagccgatctttatcaagcaaaacctcaactaggccatcactttgagagaagtaatctttgacttcgttgagaggaataagggttaaatccaatttattgccatcctcaaaaagaataatataagaaaaccaattgcctaattcaggcggaaaaagcttcatgtcctctggcttttgcatcattattgcttttccgaatggatcaagccactggtcattttctttaaacgagtcgatatccgttacaaagtaagaaatatcgtaatcctggaatttatcaggagtgatcgctttatttgtacgtgacccttctaacgtgactaagcgaattcgctcatcgtttttcgcaaaatctaaaaacagcgccatcatttcttgttcgcttcgcaatgtactctcctccgatcttctattttattcttatttttataccctcttccctttctgcaagactttcattcgcttaaagttacatgtcattggcttttttatatcttaccttaataccacgctcgggatgtgcgtttaaataaaaaaagcccccttggcgtgaaaggaagattgactttccactcaaccaaggaggttcatactcccaaaggctaatccagaaaccagtgtagtctcatcattcaatcttaatgaaaccctcgatacaaaacgcttgtccgagcgtcctgccctctattaatggcacaactgatgccttaaagaacactgctcatttttttgacgttgtttcggtccttctcaggaattggttttttcaaaaagccaatgatcaagcatgtaatgatcgacccaagcaagatgcaaccaacgtacaataatggtttatcacttgcgatcgggatcacaaaaataccgccatgaggggcctttaatgaaatatccagcgccatgcacactgcaccgcccactgcagcaccgataatatttgccggaatgattcttaatggatcagcagcggcaaaagggattgccccttcggtaataaagcttgctcctaagacataacttgcttttcctgcttctgcttcttgaatcgtaaagcgattcttaaagattgttgtcgccagcgcaattccaagtggcggaaccattccgccaaccatcaatgccgcggaaggttcaaaaatattggcagcaaacatcgctagcccaaaggcagaagccgttttattaatcggcccgcccatatccgaagccatcataccggctaataaagcgcctaacagtgccgcatttatgccagtaagaccttttaatacagcttccaagtattggttaagcatagacataggtgtgttcaagataaagaacataaacgcgccaacgactaacgtacttaataatggaacaattaaaacagacactaaaccttgaaaagatttcggtattttggccattgccttgccaataaattttgcagcaaaaccgcctacaaagccagctatcataccaccgaggaaaccagagcctccgattgtagcaaccatgccaccaatcatggctggggctaacccttgtttgtcggcaatgctgtagccaataaacccagctaaaataggaaccattaatgcaaacgccgcttctccaccgacctgactaaagaaatgggcaatcacattgtattgatcgctttcaggatctgccgcataaatgccaaacataaaggaaatcgcgataaaaatgccaccgactacaacgaatgggatcatatacgaaaccccactcataatatgcttgtaaaaattcaatcctgttttttcttcttctaactctggctcctgcttctgtacggcttgctcaaccttttcatcccgaatacgataggaaagcgcttggtcaattaaatgatctgcatcactaatcgctttctttacaggtacatcaataaaacgtttaccttgtaatgaagaagtatccactcgtacatcgtgtgcaacgacaatggcgtctgctttctgaatatcggctgctgttagtttgttttcagggccatttgcgccattggtttgaatttttactttcatgccccgtttttcggctgcttcctttaatgattctgccgccatataggtgtgggcaattccagtcatacatgccgtaattccgattaaatattttcctgagtctgcttcgtcagttgtatccttttcctgtaagcggtcctgttcctcaatcgctttcatcacctcatctactgatgtagcgacaaggagctttgctctaaacgtttcactcattaaaaaggttgaaagtctagacaagagcgctaaatgttcatttgaagcattttccggcgcagcaatcataaagattaaattcgtatgttgcccgccaaaatcaattccttgcagtgtccgccccattacaattgtcggttccggcacagtgctagattttgcgtgtggaatcgcaacgccatagccgactgctgtcgaaatttcttgctctcttttataaatcgcttttttgaatgcttccgggttatcagtaaggccgttttgtgccaatttatcgactaactcatcaataacagctgtctggctattcccttgaaggttcaaaattatattgtcacgcgttaaaatatcgaccaatttcacgttattccctcctttaagtgtatgagtttagcaaaaatagaggtgtgccttatttgtcgaattaaataaatccattttttgttttacaacttgttgtgctgctttccgcgcacttggcatgatcacgtctggctcataggcgctttggttagccgttaagaaacgccgcatttcttcaaagaaagcacttttcatatctgtcgataaattgatttttgcaacaccatgaagatacgtttgcgatatctcttcatctttattgtcacttcctccatgaaggacaagaggaattcctactttttcgttgatttcagcgagcaagtctagctttaactctggtttgcctgcgtgcttatattgaccatgagaagtaccaatcgcaatcgccaacgtatcgatccctgtatcttcaacaaatgtttttgcgtcgttagcgtctgtatacaatatttcgtcagccccgccttcagagcttccttcatttgatccaattgtccctaactcagcttctacggaaacatttacgttatgtgcaagtttgacgacttccttcgtgatcgcgatattgtcggcaaacgaggcatgtgaggcatcaatcatcacagacgtgaacccatttcgaatcgctctcatcacatctttgacagacgcgccgtgatcaagatgaatggccatcggcacttttgcgtttttgcatctttcccggacgtaggccacaaattcatcgccaagcaactcaatttcattcggatggatttggatgatggcaggggcatttttttcttcggctgaatcgacaacgactcgtacaaactcactgtttgcgacattaaaggaacctactgcaaagtggtgttcgtatgctacagctaacaattctttcatattcattaacatggattttctctccttattggttaaatctgattccaaactttgataaattctgttttctgttctgtatgaagaagctctcgtacatgttcgattctctttgtcttctgaaaaaactctgtaaaagcgtattcattccgttcaatatcggaagagggaatgtaaatgataattagctgaactagctcattcccccactggatcgctttctgattaacgccaatgatcaccctctctttatattcttccatttcaaaataagggtgaggaatagccactaagttgcctatcgacgtataagacatgctctcccttttcatcgttggttcatagtaatgctcttggccatttagcgtaagcaagtggcggatcgcttcttcagggctattctcattcatccagtgaatcgccgcgtcctcaataatcgaattctgggcttcaaggaagaaacgaattttctttatatcaatgctttgaaagccattttgaatcataatgaaattggcagtcgtttgtggtgtaaatgctagattgatgccaatgtataaataggaatggtcaaatacataatcggtcgagcatttttcgattttgcaaatgtctagttcatcaaaatatgttgcaattttagaagcaataagctttgtccgctcatagcttctactgtaaagaatgatggtttttaatttcttcctctttttatcctgtgaatcgagaatgacttgaatatgataggctaaataagcaatttcactgtcctgaatttcgacagtaaattctttttcaatttgtagagcaatattagaagcaatactgaaagagaaaaaatattctgctttcgtttctttcacaaacgggttatagataagcaaattatgtgaagcaggattaataattcgataaatgtgattggaaatgttatttctaaaccttgtctgtgaataagtaggaacttgatagacctgttccacttgacgtaaaatctcttcaattttgcctatcacttctgggttcttgttttttattttggcatcgtctaagtctaactgtaacgatattaaataattgacaagaaaaatcgcttcatcgtctgtgatatggacgcattcatgcaactgagaccgaaacgcttctgcgacttcaaattccttaaagtctgtcaaattcaccagctctgtatcttgaatagcgacaagatgaccagcattgatttgatggataataataatcaattgagtagtcagttttttgtaaatcgagaactccatgttaagctggtgatttttattaatttcatccactactttaaagacactttcaatcgtttctggcttcacccatgaccggaatccattgatgacaaaatccttgaacatctctttctttacagaaatggacgtaaaaaaactttccaacaaaattcgtttttgcatttccgtgccaatcaatttcatgcctttaaacacttttgtatctatggaaacatcgattcctaaagcgtcaatattcattgtaagccgttgcattcgactgcgaatcgtctgtggggaataataaaactggtcggcaatttcgtcgtatgtggtgtaccgatcctcattcattaagaactggataatttcaaactccagaagcacttcttccatttctttattcgttgatccgactcgctcttgatcaatttggctatcatctttgagaagtttatagccttgcggcgatgaaataatggcgatgtcactaaaactttcattaatatccttaatatagttgcgaatcgtgcggtccgtgacatttaagatctcagccaacgcggaagcggatacatattctcgattttggttcaatagaaagtcaattaattgattacgctttttatgcaatctaaccaccaccttcctatgtcatcactgtataataggaatgacatagacgctatatccgtatattttcctatagctaggaaaatatgcgctttccatttctaaacaataggcgattttgctcatatagcctaaatactttacgcagaggaaaacttataaatgtaaaaacgaatggtctaacttggattacgttgaatggatactagaagggcgatgacgcttagaaggaagtgaatggataaagggtaagagggttgtttccttttttaaagcataaaaagggggacagaacgctccccctttaatagttatactttagctgcccaaatttcgatttcaattttaatctcaggtagtcctaactccgcaaggtacccaatggtcatcgctggatactccttttcaaacagccgatcccactctgcatataaaaaatcccaatcgatttgctcagtcgcccatatgttgacctttataatattttcagcacgtagcccttcagattccaacactgctttcacattcgagaacgtattgcgcacttggtcattcatattgctcgggaattgcccttgttgatcgccgccaacttgaccggatgtgacaaataactctgcatttctaggaatctttgtaatatgcgtatagttgcccactggtgctggcacacttgcggggttttttcttgttattttttcacgcattcgtatcccaccattctaagatttttccgcttttttcccctacactttaaatgacttcgcctgtagttgctattcttgtagtttatcagtcttacttacgtaaccaatagccttaaagatacgcacatccctatactaacacgaataagcgatgaaaccgtcgtccaaagcacagactcccagtaagtttgaagcctatcatgatatactcaattctagtatccttgatgtataacgcggggagaaacgttttataaaaacaaggaagaaggtctgatcatacgcgactttcattgccctttatgggaacagaggtagaacttccctctattttaaccccttccgtaacaacagcttgcaaggagagataaatgatgattgccgataagtttgatgtatttttatttgatttagatggggtcgtctatataggaccagacccacttcctgaggccgtagagtcgcttcaacgattacgaaaaaaacaaaagggcattcgatttttaacaaataacccttgtaccacacgagaaaaaacagcaaaacgattgcgtactttaggtatagaagcaagctgcgacgaaattatcacctctagttgggtgacggcccaatacctcagtaaggagaacatcaaaacggcctttgttttaggtgatcaaaatttaaaatgggaatgtcaacaggctggtattgatatacaggaccaagtagatgtagatgcagtcgttgttggatgggacgaccaggtgtcttttcatgacatcaaaaaggcagcaagcatgattgaaaaaggggccacattcattgctacaaatacggacaaaacctttccgacacccgaaggtccttcacctgccgtaggggccatcgtggaagcgttacgtgtgccaacagcaaaagagcctttggttatggggaagccctatcctcatatgtttaaggaggcgcttcgtgattttcacccgtcttctcaaacagtaatgataggcgatactccttataccgacattttaggagcgcatcaggcaggaataccagctattttaatagcggacaacgattttaaaccacatccttcagcaagagatttgcgtaacccagatgttgtcgtgcctcatctaaagagtctatttgacgacaatatcaacataaaaccatcagtcactccttccttttcttggcccgataatatcaaggcaggagtagcgggcattatttttgataaaaaacagagagttctcctcattaaacgtctcgataatggattatggggtattccctcaggtcatgttgaaccaggagaaaccgtcgaagaagcgattattagagaaatttgcgaggaaaccgggttggaggtaaaagtgaataagttaattggaatttattcagagccttcctctcaagttttctcttatccaaacgggaagataagccagtttatcacctcatgttttgaatgcgaggttgtaggcggagcactaatcaaaacaagcaacgaaacattagatgcgaattattttgactgtgatgatttaccaagcaaccttcttcctatgcaccccatgtggcttcaagatgcgttagcaaaggaagtaaaacctttcattaggtagtatttatatacgatgggcaacggtcctttcgtcgattagagcatgtaccaagataggcgcatgctctttttattgacagctcgataaagtatgaggcaacagtgcaaaagtgactagtatgaggacaaaaacaataaaaacctctatgtcatttgatacaagtatgccaagagcctaaaacaagattagttagacaaggggcattaaaaaatttcaagagtttaggctcttgaaatttataacgaacttgattcacttagaaaaattcaattcccatgataccccatttctgtccttgacaattgcatgcttggctccccaaaacgtatcttgcaattccatctgcacttctccgtcttttgacaactcgttgtagatacgcgttatttcttcttcgctgtcaaggtcaggcccgagcaaaatatgactgccttggatcgtcttttgcccaaatacatcagccatgtataaaatgcaattctcattgatatgcaattcggcatgaatgtactttccttcatggcctttaaacatttcaatgccgtcagacaactgggtatttttgatttctccgccgaaaacgttttgataatacccaatttcttctttgcaattctcgatcctgagatgaggcacgattcttttcatgaatgcttcctcctagtatggcttataaggcatagcgtttcataacagtataccctttattcaatggaacatccttcattccttcttctaaaatctgcggctactatcattttttcaaagatactttaaacacataacttactttttcatagtccattttttgttcataaaatcgatgtgcgctttccctttgtaatcctgaagataaggccacttgttcataatgatggttttttgcccattcatgtacatatgtaagcagcttttctccgtacccttttgaacgttttttctgatctgtgactaagtcgcaaacccaaacaaatcgtccgtaatagagcgtcaccattggtttaaagccaataaccgccacgatttcatcctcctcaaacaaagcaagcattttgtatcgatccttttcctgcgcctcgattacaaattcaagatactcgctttcgtcaagatgagtgcgcaactgctttactactggaaaggcggcgagaatttctttttctgattgcagttcttttatcattaccatgtatatccctccaacttctttagctgcttaagaaatttaatatagcccgtttctttattccattaaacctgttaaattcttattttggcagtgccttacgggaacaaaaaggttctttgaatcgcctttgtatgttataactaatgaagttgcttgatcaaggaagtgagccaatgtcagacaaaaataaactactaccggctttaaatgcagcgtttccgtataccataccgattctagctggttttttatttttaggaatcgcttatggaatttacatgaacgctttaggattcgcgcccatttatgctattttaatgagcttaacgatctttgcagggtcgatggaattcgtcgcagcgcatttgttgctcgttgcctttaacccgcttaacgcgttattgcttacactcatgttaaacgcaaggcatttattttatggcatatcgatgttggaaaaatacaaagggacggggaaaaagaagttttatttaatctttggtctttgtgatgaatcgtttgccataaacaataccgttcaaataccaccccatgtcgataagggctggttcatgttttttgtcactttgctcaaccacatttattgggttgtgggcgccacgataggaagcctcttcggctctattgttacgtttaacacgactggtttagagtttgtgatgactgctttatttgtcgtgatttttcttgaacagtggtcaaaagagaaaacgcatcaaagctcattaatagggttaggcgtttccattttgacgttaatcgtatttggtggagaaaactttattatccctgcaatggcactgatgttagccattctaaccttcatgagaaaacctttaaagaaagtagagggaacagctagacaatgaccgtgccgcaacaagttatcatcattctcatcgttgtttttggaacaatgatgactcgttttttgccctttttaattttctcagctgataaaccaacaccttcatatatcaaatatttgggaaaagttcttccaccagcagtatttggcttacttgtcatttattcgttaagaaaagtgaacgtctttgaaggaaattacggcatcccagaactcgtttctgtccttgtcatcatcgttttgcattcctggaaaagaaatatgttgctgtctatcgcaagtgggaccattttgtatatgttcctcgtgcaaatcgtattttaaacggatttcatagattgtgaagaatggtttgaaacaaaagaagaaagactactaaatgcttacaaataagtttaccgacgttaaataaaaatttttttattttagaggtgaatcatatggacgcttttaaagaatttttagatcgtattgataacccgcaacaccgtgctcgaacggaagaggttttggcctgggtaacgaaaacatttccacatttagtcccgaaaatcgcatggaatcagcctatgtttaccgatcacgatacatttattatcggcttcagcgtcgctaagcatcatttggctgttgcccctgaacaagcggggattcatcacttcgttgatgagattgaacaagctggctatgatcacactaaggaactggtacgtatcaagtgggatcgtccagttgatttttcattattagaaaagatgatcgagtttaatatacgggataaagcagactgcacaactttttggcggtaacgagagacagttgatggaacaaattttagggggaggcattgtggtacgatgccccccctttttacatacactctggctgaatccgactactgaacatgccctttttcaaaatatgtcctaaggcaagccgcaatactagtgaaccgctctcgctagagggacatttcaagttcataacaaccatccccctccctccacactgctaccatcacttaagatttttttattcacgcctggactcgtcttataaaaaagattgacacgcaaccaaacggtgtcctataatcaaagcgtcactaaatggtgtccaattataagttgtcaaacagccactagacgggctgacttttggcaatcattattaggagagggtgttgtgaacgagtatagcccatcgcgggacgtgtttgacgcgattgccgatccaactcggcgccatttaattcatcttttggcagaagcagatgaaatgccactttatgaattgacggcacagtttcatatgggccgaacagccgtatcaaagcatttgactgtcttgaaagaagccgatttagttcgtgaccgaaaagtcggcagagaaacgcgatttcggctaaacgctgctcctctgagagaagttcaagattgggtcgctttctacagcaagtactggaatacgaacatgttgcgcttaggccaactattagaggaggacgaagaatgagtttaaaattagaattggatttccaatacaagacgtcgatcgaaaaactttggtcagctatcactgactcaaacaagcttgcccaatggattacggaaaatgattttaagcctattgtaggtcatcgctttcaatttcgccatgagccatccgaatggtgggatggtattgtcgaaggcgaagtgcttgttgtcgatgaaccgaatcgcttgtcttatacttgggcaaccggagacgaaaggcataccgtcactttgacgcttcaggatttaggggacggaaaggtgaaccttcatctcgaacaaactggattttcgaatgttcatggcctcgaaggcgcgaagcatggttggagtgcttgggccaacgaacttccacaagtgttggaacaataacttgcactcggttgttaatcgttgcaaatcggctgcatgctgtttgcagccggtttcgtaatgactaagcgaaccatacaagaaaacgatttctattggaaggatgttacgtatgagcgaattgaatcgagaatacatcgtcatctcgggtgcaagggaaaacaatcttcaaaacgtctcattgcgcatccctaagcgaaagatcaccattttcacaggcgtttctggatcaggcaagtcatcgattgtctttgataccatcgccgcagaatcgacccgtttgctgaatgagaacttcagcatgttcgtgcgcagcttcctcccccgcgttcctcagccagatacagacgcgattgagaacctaagcatggcagtaatcgtagaccagaagcggctaggcggcggctctcattccacaatgggcacgattactgatatctcaccgattctccgtcttcttttctccagagcaggccaaccctacgttggagaatcaaacatgttctcctttaacgacccccaaggtatgtgtcccgaatgtaacggtattggccgcaaactgaacgtcgacatggacaaagcagttgatctgtcaaaatcgttgaacgaaggggccattaaactacctgattataaagtcgacggttgggactggtcattggttgtacaggcaggaccctttgaccctgataaaaaactgagccactattcggacgaagagctagaaaaactgctttacagcaaagcgaaaaaagtaaagatggactttgcaggaaaagcaacaaatgtcacagtagaaggcgtcattgagaaattcaccaacaaatacatcaagcaagatttgaagacgaagtctgagcgtacacaaaaagcagttgcgccatttatcaccgagggcacgtgctccacttgccacggctcgagacttagtcaggctacactcagctgcaaaataaatggctttaacattgcagaaatgtcttccatggaggtcggacagctcattcgcatcattcatgaggtcgacatcgctgttgctgcgccgatcataaagtcgttgtcagagaggctacaacatcttgtcgatattggtcttgattacctaacattagatcgggaaacagatacattgtccggcggcgaatcgcagcgcgtcaagatggtcaagcacctgagcggtagcctagtagatgtcacgtacatcttcgatgagccgagcgtaggcttgcatccccgcgacgtacaccgcttaaacgaactgctgcaaaagctgcgcgacaaaggcaatacggtaattgttgtcgagcatgatccggatgtaatcaaggtcgccgatcatattgttgacgtcgggcctcacgctggcagccatggaggtacgatcgtatacgaaggaagttttcaaggcctgttggagtcaggtactttgaccggtacccatatgaagcggccacttgagctgaaacatgacacaaggcagccctccggcaagctgtccatcaagaatgcgacattgcataacttaaaggacgtaaatgtcacaattccaacaggagtgctgaccgttgttacaggtgtggctggctcaggcaaaagtacgctcattaacgacgtattcctcagccagaatccagatgccattgtcatcgaccagtcggcagtaggcgtgtctacacgttcaaatcccgcaacctacacgggcataatggatgatgtgcgcaaagcgtttgcttctgctaacaaagttaacaaaggattgttcagtttcaactccaagggagcttgcgaaaactgccaagggctcggcgtcgtgtatacagatcttgcctttcttgaaagcgtgaaactgccatgtgaagtatgcagaggcagacggtttaaggaagaagtccttgcctacaagttaaatggcaagtctattgcagaagttcttgagatgactgtagagcgggcattggaatttttcgaacaaaaagagattgtccgcaagcttcaggcaatgagtgacgtagggttggattatattacacttggccagccacttagcaccctttcaggcggggagtgccagcgtatcaagttggcaagcgaacttcacaagcagggcagcatctacgtgatggacgagccgacaactggcctgcatatgtcagatatcggcctgcttttaacgatcatgaaccgccttgtcgatgccggcaatacagtaatcgtcattgagcataacctcgatgtcattagccaagcggattggattattgatatgggaccagacggaggcagcaacggcggcgaggtcgtgttcgaaggcacgccttcacagattatccacgcagagcagtcgatcacaggaaaatatttggcatagagcaggaaatcgtttagaaaagcccgctattcgggaaaaggagctgaaacatgacattttttcaagatgtattctcggtattcaaaaagagagaattgttttttcaacaaagctacaaagaatccgatgacatctattcttttctttttgaaaaagagcacgatgtaacatggaaagcaggacaatatggattgttcagtattacgcataaaaaagtgaaaaatcctacaaaaccgttcagcatagcctctgcccccacagagaatgtcataaaaataacaacgcgcattagcaataaccccagtgattttaaaaaagcaatgctcgaattaaaaccaggtatgaaagtaaaaatgagcgggccagtaggagcttttactcttcaagaacaaaagccctcactcctgatcgcaggaggaattggcatcaccccatttcgatcgatcctcacacaactagaggcagaaaaaaatggagacgacaaacacattcatctcctctacctcgatagcaaaaagtcatacctatttaaagatgaacttgatgcgattgccaaccgcgcatctattcacgtgacttaccttgattcacaagacagcttgcatcaagagattgaccagtttgctgcttcacatcaaaacaatggcacttactttattgcaggaccaaaatccatggtcgagtccatttccacttacttgaaaaacaaacacatttcaaaacggaatattaagaaagatacttttttcggttattaaagggaaagaaggtagagcaggtatggagaccgttctaccttcctaattgatacaggcacgtgccggcagaccagagccttagtctcagtgaccataggaatcggcgccctagatgataaaaacgaaacgctagctgcgtttgtcacttgtggtctttttataattcttttgcatcaccactgtaaagtactataatctaaagaccaatatacaggagtaccctaataacactatgtcagggatggaaactgtcatctaaaaaccaataagcgaatcattaattttttattgttaattaagcggccgtttcctttattgtttctacttcattatcaatgaacttaaaaaaaggcaaagtaaggccgacgaaagccgctgtgctaataatcaatccaatcaataaataaagtggtctaacaccaaatgcttcacttaataaccctcctagcaatataccaagaggcattgtccctctaatgataaataatcgaacagaaaaaactttacccattaagtcgtttggaatcacttgctgacaaatcgtagtattgtgtatactaaaaatcgccatcactataccgcctattatttctgttgttattgcgaaggatatactatgattaaaggctagaacgagaaatgtgattccaccgataaacaaggaacccaacatgattaatcttcgactcttaaatacaattttcggtactaatatcgctcctataaaataacctatagggaaacctgccataaaataaccatattgcgcatatgagccattcagaacctctgttatataaggaagcgttgtgaccatcgttacacctactccaaattgaacaaaagctaaaaaaaaccctaaccaaacgacaatacgttgtttaaaaaagaaataaatgccttctttaaattccaacaaccacgtacttcgtactgtttgatctgctttttttccttcgtttataagtaataaggtacagccactcattaagagcagaatactaaccaataaaagtgtcacgtctaaacctaaatattgtatgacaatgcctgccagtattggcgctaaaaaagacatgatgcggaccgttccatcaatataagcattagccgactttaattgttctttcggtacgatcataggcgtcaatgcatggttagcgggcacgtagagaggcgaaatgaaaccgactacaatttgtacagtgtatatttgccatacctcaaggtttccagtatataacgctattaaaggaatgaaaaagatcatccctcttgtccattgagacaagaccataatccactttctactccaacgatcgatatatggaccaataaccaattgcaagataagggatggaataaaatacaacaaccacatactccctaacgcaaaagttgactcggttaattggtatactaagatcgagttgcaaaatgtgccaaacgcccctcccatttctgaaattccatttcctgcccaagtagaaataaacgaacgatttttgaagagttgtgttttcattagagaaccccttgatcagcgatttagatactcgcttaattcttctgctagcatatttaacgcattttcttttaaagcgtatttcgtttctttcatacctacaatttttgacgcccttaagatttttaagtgatggtgaacagtagattttcccatgtccagcatgttagtaatgtcttgaagcgagcgatccttttcaaatagcaacttaacaattctgagtcttacatcatctccaagcgctttatacttttgaactaagaagtttgatggcatgtatttatcgtctggcgacaggctttcattagcaactggataataaaatacttttgtcccctcaatgtctgcttcaatattccaaggacgataaataaattgtggaattaataatactttgtaaacactaggctccggcatataatgaacgcctcccgtcgcccaatgaaccaactcttccgggtttaatttttgtttcctatttagcttggatttataatcaaactcaagtatctgctcaatacgttccaatttaggtttgataacagtattaaaccaacttgtcatgacataaatgagatgttgcttcaatcgtgccgtttctaccttgaatagaaaatctacgtattgtggaaaaaatggattatcctcagtagctttaattaactttaaattggcagcagaatcaccttcggcagcactttttcttacctcttgataaggttccccaatataaggaaagcaaataaatttgagttcataagcgtctagctcattaatatactgacagaaatcagaaaggctagttcctttatagtaatgaagcaattgtaataatgccttccatgtattattttcctcgacatacagtaattccctcaatagttcatctgaaaaattttcttttaacgttggccaataggagtttggtttttctagtgtgtcgattaattgtttattagtaatagccgcaatccctaaagcacattcccataatggggaatgggttaattcgacctggtatgtgtctctttttctacttgttatatgtaatatgtccactggcaccctcctacatttgtttatatacagagtacactaagaaagaacaccgttcaatatttttcgaatgaataattctaaaacaaccgaacgatttgttctgtcttccacatccactcagggcgacacaataagcaggagttttaagttaaacgcagaatagctacctatcaaggtttaaaggagttgaaagaggttaactctggtgggcgttgggaaataattttaggagggggtgggctcatgggcaatccaatattaaaacaaattggcactgtattcattcctgtcagtgacatagacaaagctaaagattggtactgtgatatttttggatttaatggagatggggagattctgtttggtcacctttatgtcattcaactagaaggaacggggattgtactagatagcaaaatatattcgccagaaaaaacgtttcaaacaccagcttttcacttcaataccaataatattgaagaagcttatcaatatatgcagagtaaaggcgtgaaacttcttacaggaatagaaaacaaccattactttaattttgaagacttagacggaaataggttaatggtttgcaagtgttaattgattccatcgatcatcattggattaagcctattaggcagataacacctccccaggcgatagtccgatacaactgaagaggtgattttagattttttataacctattacggaaggttctgttagtaacctctctgttataaccgttagcgtaaaagagttttgatgatctccgatgtcacttcagtagtggaactagttccaccaatatctggagttcgaatacctctgctagttacttcttctatagaatcaagaagatgatctcctaattcagtttccccatgatgatctaacatcatcttagcagtccagatctgaccaataggattagcgattcccttccctataatatcaggtgctgatccatgaactggttcaaacatagatggatatttaccattgatgttaatattagctgcaggggcaatgccaatactccccataatcgcagcaccaatatcggttaaaatatcaccaaataagtttgaagcaacaataacatcaaaacgttcaggttgggtaacaaaaaatgctgctagtgcatcgatgtgttgcgaatcaacttcaactgacggataatctttactaatctctttaaacacatcatcccaaaaaggcatggaatacacgataccgtttgattttgtagcacttgtcacatgtccacgtctcgtttttgctaattcaaaggcgtaacgcattgctctttcagttccccgtcttgaaaatacagcgttttgaatcgcaagctcttcatcttcattataaattctaccaccaatcgaactatactccccttcactattctccctaacaacaagcaaatcaaaatttttcgggttggataacggggagttaatacctttaattaatttcgctggtcttacgttaataacttgttcaaattctctgcggattttaattaaaagcccccataaagatatatgatcaggaactaaacgttgatttcccacagctcctaagaaaatcgaatcaaaatcctttatttgctccaatccatcttcaggcatcatacttccattttctaagtagtattcgcaactccaagggaacgatgtaaattcgaatgtcaatcctccatgcaattctgcaatcgctttcaaaacacgttctgcttcagggacaacctctcttccaactccatcgccaggaatacttgcaatgtttactatcttcattggacatcctcctattctcctaaaagcgacagtcgactaacgaccgtcgttcttttctggattatactattagagaatctgaaaaacaatacccgacttagtgttttatatatcaatttaaaaatttgtagggatatgtacagcatgagggggtttatatcttctaaataaaaatcagcagtaatgatctcctatcactctgctgatttatattaactgatcatcttttgggaagtacttttatgagatgggctaaatctaactcaagatgtgaaatcatcgctttagcagctttttccggatctcgcttttttataaattcaaaaatccggtaatgttgctcaaggataacgttcgcgcgattatccccttggaaatttaatatacgaaaataatagatcaacgcttttaaatcattgatttgcttttttagtcttaagttctttgtataatctataatggtactgtgaaacaattcgtttaatgaaatgatgcgatcctcttccttttttgaagaaatagcttggtcggtccttattaatagcttctctaattcatgaatgtcttcatctgatgcaatcttagtagcctcacttactgcaaatgattcaagtgccattcgacagaaataaacctcttcaacatctttttgggttggtttgtatacgataacccttgatttttcatctacaatcactaaaccttctttttctagaattctaatagcctctctaattggactcttactaacattaaactcttttgctagttgagtttcaactattctgtcaccaggtttaaagtgtccggtaaatatcattttcttgattgaatgataaaattgttcgtaatacggaataggtctttcaacgacaaactctttcatttaatcaccttattcttcctctatatttcacgaatttccggaatgaatcttggttagctagcattcagaaggcttctttacaagtcctattttacgtcatccttataattgtgcaaagagaaatccaaaaaccgtttactttatctaatattcggtagcataaaaaaaccgactggctttgtaagcacaaaatagtcggtttcaaataatctcatgaaatttatagctggtacgacaccaaatttatattgattaaatcgattacccaacaacaattagttcacatacaaatgaatttggtttccagagggatcttcggtgataaactccccattctcttcaatgactcgataacccatagcctgtaattttacaacgattgattttcttttttcctcgcttggaataacaaccgtataaaaaagcatcctcacactattggacacaggttttggggcattttttccaaaccacatattggttccaatatgatggtgatacccaccactagagaaaaaggccatttgatttggtatatccatagtaatgtcaaaccctaaacctttatggtaaaagtccttcgttttttctaaatcagatacatgtagatgaatatgaccaatcagtgtttcatttggaatccgattccatggttctccgtttgtttcagcaataacgccctcgacatccattggagcttgcttcgaaaagtctaattctcctgctgtatttctccacgtcgatggatcagtgtctacagctacttcgataccatgaccatcagggtcttgaaagtataaagcgtcatgggttccatgataggtagcaccttgtaatggatactttttattcaacagatgaatgatcaatttccctaaatctttgcgagtcggaaaaagtaaagcataatgatacaaaccggttgtccgctcttgcctaggaataatagtgtcaggttgttcaatcgtaagcaaaggagtggttccgtttgctgtcaatactgctttttttcctgattgatttaatacttgaaatcccattaagccttcgtaaaactcaagcgaacgacttaaatgttcaacttttaaatgaacgtgattcacaaatgtatttggttttctatgatagacattcattttttacctcctaatagattctacaaacaaaggttcatatcaggcagagcgtatagtgggtcccaatgttattgtttaacgattaaggtcataataaccccttagaataataaaaggaagtaggcacattaacgttctatagtatacaaaaagataccaaaggataataaaatagctctcttttttaaaaataaaaaagcaccgaagcctaaaagacttggtactcctcactttcaaactattataaacaccatttatattgtagggtacttcacaacaggccatttttctttccttaacttattagtaaacttggaatcgacatgtatattatgttggacaagttccgttggagtaagagccaaccattgatttaaagatacatcttcaaaccgatcacttttgaacatttcaagaaaccacactgattcgttgcctgtattttgaatatagtgccctgtggcaaaaggaacatacccaacatcgccagcccgataatcaaatgtacgcgctacgccattcccagtaaacacagtcattcttgcctggccagttaagtaatactgccattcatcattattcgggtgccagtgcatttccctcatagctcctggttcaacttcaaccaaagcagcagcaattgttttggaaacagggaaattccttgaatcgacaatacgtacactgcctccaggtgtgaccaatgggggctgttttaataattcatgcttaaacgtttgtggcacagcgccataaggggagtttatttgttgcgactgcaacggtcctggaacttcatcctggtaaatatacacttgttcagttggaatggttgcaaatacagattcaggtacaccaaaatttgccgaaagaacgtctttcggcgtgtgggccatccaatcggacaacgacaatgtacttaaatcagagaacatcccatcatcaaaaacaagcaaaaattcacaaccgtcatccaaaccttgaatcgagtggggaatcccagggggaaaataccataagtctcctgggccgacatctgctataaagttcctgccattttggtcaacagccgtaatccgggcatggccaagtaacatataagaccattctgcttgcttgtgccaatgaagctcacgtacgcctcctggtgttaaactcatattcactccggcaagtgttgtcgcaatcggcaaatccttttgcgtaatttctcttgaccaaccgccatgatttaattgcatatgggcatcggaaaaagaaaaacgcaaattaggaatcaacccacgatcggtttccggtggaacaagtatattaggattctgaagatcacgcatcaaattccgcggaccacgatcaacgcctccagcgccatcagctcgaataggctgcggaatatttggattcccttttagcggcttcacgttatctccccgtttcattttttaatccctcccatcatattaaacaagaagccgctttattcttagtagttcgtcaacttaagaacttgtcttattttgaatatagttatcctctatattttttatcctcaatcgtctacttgaataaaataacttttaattggtataaataaatcattcgtgttttaaaagatttatcaaccgacgaggtgaacgctatgaaattgaaaccattcataatttttggtttagttggttttattgccggtgtatcaataagcctgtttgacccgaaagtttttcaggaatattattatggtggcgtgatcattgcttatactggaatggagattttttttaacatagctagatatggcgttctcggcgctataactgcgctcgtattcgtattggcctatcagttaaaaccgaaggcaaatgtaggctagtccagaaaccaatccattagaagatggatgttaagccagcgtgaaagactgttggcttagtaccatttccacattaattaatatgaaaaaaggcgcaatatctagtgaaagtgcgccttctccatgtcatctacgaatttacatgttcctatctcatctcggactcttgaaaaccatccatttctcttctgtggtgtgctggcgttaacgggcatttggctgtttcctgtacataaaagttaatggttttcttttccatatactttccactcctaatggatgatccttaaccagaagtatagacttaataacgttataaacaacacaggcagcgtaatgactataccagtcttaaaataagcgccccatgagattcttacacctttttgtgtcaacacatggagccacaataatgtggcaagcgaaccaataggtgttatttttggccctaaatcagaaccaatcacatttgcgtaaaccatcgcttccttcattaatccagttgcgctcgtcgtatcaatggcaatcgcattaatcattactgttggcatgttgttcatcatcgaacttaaaacagcggcaacaaaccccatcgccatcatagcagcaaagacaccttgttccgcgattctctcaagtcccaaagcgagcaaatcagttaaaccgacattttgtaaaccgaacacgacaacatacatcccaatcgagaaaaaaactatgttccatggcgcgcctttcaatatagatcgggtttgaacagcagggctttttctagctatcactataaagagcaacgcaatcagtcctgcaatcatagaaacgggaatatgcaaaaactcactgactaagtaacccattaacaatagaacaagcacccaccaagacaagcggaacatgttattatctttaattgccgatgcaggtggttgcaacgtctcgtaatcatagttgttcgggatgcttgttcggaagtagagatacagcacaaggatactagcgattaaagagaagacattcggaacaatcatccgtgttgcatattcaatgaagccaatcccaaaaaaatcagccgaaacaatgttcactaagttacttacaatgagcggcagcgacgttgagtccgcaataaacccactggccatgataaaagggaacaccatgttttcattaaagtgtaaagcacgcaccatcgctaaaacgattggcgttaaaatcaaggcagcgccatcattggcaaaaaacgccgcaactacggaaccaagaatgcacacatatacaaacatcagcttggcgttccccttcgctgccttggtcatatgtaaggcggcccattcaaagaaaccaatctcatcaaggattaaagaaataataataattgcaataaacgtcaacgtggcgttccacacgatccccgtcacttccaccacatcggcaaatgaaacaacgccaaataataaagcgagaatagctcccccacacgctgaccaaccaatattcaagttacgtggctgccaaataaccaacgcgagcgtcgtaataaaaatcaatgaagcgaaaagaaccgataacaacgcttaatcccccctttacccacagtctacaggtgtttccttctctataagactgcggtaacgttcatcttgatctgaaatttgcttcaagacgacttgaataagttcagctttcggagaggactggttcaaagaataaaaacgccattggccttttcgcgtttccactactaggccagcttccttaagtttctttaaatgctgactaattgaaggttgactcgcattaaacatatcgacaaattgacaaacgcaatattttttctttgaaacaagtttcaacataagcaaccgagtagggtcactaagcactttcatgcatgtcgcaatttcttcggaacttaaactgaataccattcatgatcttcccccttccagacaccattataaatgcagccattatataagtaaacgctaatatatatgacaataatttatgtgttccataaaaaaacgagcacctgagcactcgtttttttatcgttcaagatattggagtattgcctttctactcactgtcttgttttgtgtagaaatattcccatccgtttcgatcgggatccgttaccccaaatttatcttagacagcatagcagcaagtagtattcaattcttcacgggcaaagaaaccttcacgttcgagcctttctttatgtttaagtacatcttctttggtctcaacctgtatacctaaatgatttcctgccactttatttctttgtgttaacgtcaaatttaaattaggttcttgggtcagaaatttgacataatcgtcttatacttttaccggtttaacacctaagaatcgttcataaaaggtttgactttcacttaagtttttttacattcaccgtgaccgacgacgcggtaatgtcttcttttgcttgagactgatatccgaaaaaatctgtttgttgacattaaaaaaatcatcgtgttataattaaaaatttgttaaataaacaaatgtatggtaaccttaagacagtcccgtatatggaggtggattatatgtttcaaattggcgataacattgtttatccgatgcacggagcaggtgtaattgaggcgatagaagaaatagatcttttagaggaaaaacaacagtattatatcataaaaatgtcaatcaacaatatgaaagttatgatcccaacaagcaaaattgtgagttcaagaatacggccagttactgatatacttgcgataaaccacattatacacatatttcagcacggagaatcagatacgttactgccgtggaaacaaaggtataaagtaaacgcggacaaaataaaaatgggtgaaatgcaagaaggcgctgaagtggtacgcgatttaaggcgcattaagaaagaaaaaacacttaatacaagcgaaaaagaactgttggataatgcctatgaatttttgcttagtgaactggaagtcgttaaaggaatcaccgataggcaaataaaaagtttctgttaaaaataaacatcattgcacatcagaaattcactaaattttttggtaatattataattaaaagtcatcatttcaaagacgttcaagtaggttttttagtgagcatgatacagagaacataaaaaaacaggccctatttaaggagcctgtttttatgaaaattaatttttttgaacgttagcagcttgagctccacgagcaccttgctcaatgtcaaacgatactttttgaccttcgtctaaagatttaaatccttcactttggatagcagagaagtgtacgaaaacatcgtctccatcttcgcgttcgataaaaccaaaacctttttctgcattaaaccatttcactgtaccttgttccatttttgttgcctcctagtgtgttgccacacattatattactactcttgtccaaagtatcatcaagacgaaaagtcaatattcatactatcctttacaccgaacaaaaataattctctttattataacaggaaacggaagtaatagcaaattaattttagttttttttccatagccgtataacgtgtagatgtcagggtaagaacggcatcgagcatgtcatcatctcccctaaaaaattttacttttcagctggcgagattgcttcacgtatgtatatgatgactatatttaaacagtgaagatttgtatgttattaagtaaatgccttggaagaagttatataagtaaaggctaattggaggatacgttagatgaaacctagaattggtatgattggattaggtgggattgctcaaaaagcgtatttacctattttatcaaaggaagtagattggacctttgtcggagcatattcgccgaacaaacagaaaagagaacaaatttgcaaccactatcgcatcaaagcatttgaagacctacctacattaagtgaatcatgtgatgccatctttgttcatagctcaacagaaacacattatgaaattgtatctcaactacttcgcgatggaatcgatgtttatgtcgataaaccattagcagctactattcaacaggctgaggaattggttcatttaagtgagacgcttggcaggaagctcatggttggatttaatcgacgcttctcaccaatgtatgtgaaattaaaaaagttactgaaagaaaaagacactgcttggataaaccttgaaaaacatagaatcgtctcaaacaatgatacgctttcttacgagcacatcctgttggatgactatctccacctagtagatacagttagatggctttcggatggaaacatacgttttgaaaatggcttcttaaaaacgattgattctaagttagcctttacacagcaacaattccagtctgatgacaatatcatctttaacagttccatgcataggagtgcaggcactaatttagaacaactagagatggtaacaactgggggaatctttcgtgtgaaaaacatgaacatctttgaatgtgaaacagataatcacctttccactttttattctggctcctgggaatcacttctcaaacaaaaaggatttgagcatgctgtgaaccatttcattcagtgtatccaacaaaatattgagccgagtgtaccagcaagagaaggtttagagtcgcaagtattgttgcaagaactcattcaacagtccaagcgtctttaaaagatcgccaacagaaattaaatcatttatagtcgtgtaagtcttttcctcctcatgttattttttcgtttatacgatttttatatgtgtctaatttcttataatcgatgtaatataaaataatgagtatactaggagatgtaatataaaataatgagtatactaggagaggaaatttatgtcgacgactacattgaaaataatcgccttatgcgctatgttcattgatcacatcgggcaattttttcctgagacaccggaatggtttaattggattggaagaatatccgcccctatttttatttattgtgttgttttaggaattaaacacactatgaataaaaagaaatacctgattcggttatacttattttcattaagtatggcgattataaatatggtactgaatcaactatttgattatacccatttctatatttggaataatttttttagttctttatttgttgttgcggtagtgatacttttactagacaactttaaagcaaaaaacttgtttttcttcatcatttggcaactatccacccttattttatgtttcgttttagttgaaaaatatgaggtattaagactaagtgacccatcaggtacatattactttttaggttcagtatttggtaatatcctctttgtggagggcacttttttaggggttgtacttggagctatattttatcttactttatcgaaccgaattaatttaattattctatatagctccttctccttgtgtttttatatgcttcatttaaaggtaagcaattacggaaacccagtcattcacacatatttgttcccgtttgcagactatcaatggatgatggttttcgcccttccatttttattgctctataacggcaacagagggattggcttaaagtataccttctatattttttatccattacacttagttattctgtatttattagctgtgtctcgattgtagtagattaaatctacaacttcctactagttaaacaaaatcatcgcttaaacgacttcttttgaaaatcagcatataaaaaataccaaggtcgcttctaacccttggtattcttgtgatcttacgatgaatgcggctgagttcgtgttggttagggaaaacccttcttgattcacactaaattttaatggctttaaaggtgtcttatgcaacagcgttgtcatacccgggtgcttattgcttagctattatacgttgtaattcaagttacaaaaccaaatatatgctcgttaaatgcaagcactcttactaggcagttgcatatactgtaaaaaagcctaaggagagatttgctgtgaattactactataattcattttacaacagtccccaaaacctgcctgaatggagaggtattccctattaccaaacacataacatgtacagaacagtgccataccaacaacccaaaacggattttgggaaagagccctttacattaaacatctcacaggcttccaaaaataataatacctaccgcactgtcatttggactggtgaacatctacaagtaaccttaatgagcattaatgtcggtgacgatatcgggttagaaatacaccctcaaacggatcaatttttaaggatagaacaaggtcaaggcttggtacaaatgggtagcagccccaatcatttaacgtatcgagcaaatgtttccgaagatagcgcgattatggttcctgctggcacatggcataatgttaccaatactggccctgtccctttaaaactttattccatctatgcgcctccacatcatccttatggaacaatccaaccaacaaaggcagatgctatggaatcgtgagaaaaaagaagaccttgcttcggcagggttattttttctcgtttacgttcctttttttgggtttgtgttttttaagaaagcaccatcgtaaccaatcttaaatcaaggggggtcctattagattacgacaaaagaagaaacctggtattcagcaagttcttttcttaataaggttcacttacaacatacattcctgagtctttactaatatggatatatccttgtgtatttttcttactttctaagaaactaataaattgatcatatctgccttgcttgtttaaagcatcttcaagtcctgtatctatcgaaaagatataatcagccaaatcgtgaacattcgtaactcgtaagttagattcgtacttcaataactgaacacgattaaaagagctgcgtaatgctttttccccattctcaagaccaaaatacgttgaatggaccggtttaatgaacggtaatgaggaatcaaactctttaacaaaatgataaatctctttcatatgactattaccattagtcgcagcataaaaaagaccattaggtttcaatattctttgaacctcttttaaagctgcttctatgtttggaacgtgatataacatatgattcgctataacaatatcaaatagggaatcctccaaatgcgtagcttgaatatccatttctccaaaagttatattttgtttttcaggaatatttcgttgcgcttgactaaccatccctttagaaaaatcagttagtataatactccagttttctctaattttcattaaattttccgtccataagtatcctgatccgcaaccaaattctataatgttactctcatcatcaaattgaatattgtcaaacacccattcatgccaatctattcgattggtgctatattctttatgtaatcttattcgagcatcaagttttgatgaatttacgtactgttggtttaagaattgattagagttagttcgcataagattcacctctctgctattttaaaatatgattttaacttggatagagttgtctatgtatacattcactaaataattcctttaacctgcaataaataatcgtaagagaaggtgactagcctccgacctctgtcaccacaatacgcacggttccgtatatagcggctcaattttaagcacggaagctattgtaatgttgtacacaggaaattagccgaaaacatatcgttcggtcttttatgtcttcacatctcctttttctaatcccaagcccctatcattgaaaagattgacagatagaatacattattcatattaaaaaaggctatcttttcttggataagaacgataatacacttccgcactggcattccaatcccaaaatactgatccttgtgaaagaatgtatctctccagaaacatttcaaaacttgaattcaaaggtctaggctcatccacatcttctaaaatataaagatagttcgggtttctttttttaacctttttcttattgataattaaatgacactcttcaagtagaaatgcaatagggatgtctttagtgtcaagatacttctgagcttctttcatttgatcaagattaaacagccttaagccaccacccgcaggctcaccaaaaagcaaattcccataaatccttgctccattatggagagacaggaactctttaaaatctgaagggatgtttatgccttgatctttttcgaattgtgaaagatgattttcagtaactggctcattgaatgaacaaaagcattcctgtgatgtgagaagtgatttaattttcccctcctcatttaatgcttctttaagactatctaagatttccttcaaagtgctcgacattttcttgcctcctattatctagtaagcgttccaccaaggtgttgcttttttgtaatgaaagtctctaggtagatgaaaaaggttgttcattgcattcgtcccaccgtactctaaaggaatgacgtggtgaagatcataagctttccaacttatttttggagcagcatactgaccaatatattagcgtctctttgatcagcacgtacaaccttcatatctgcttgcgcaggagctagcatataccttttattatgtaaattatagtgttaaggattataacactgctttgccgtttgtcaaaaatgcccagtagaatgttgcttgtaatgggagctagccctgtccacgctgctagcattattaataaatcaataagaagaccatgtaactggtaaaaattaaaaaagcaccaaagctctaaaagccttggtactactagtatgcggttgagaggaatcgaacctccacggaatttaactccaccgaagtttttggattgtcaccttattctttttcttcttttttaatctcatgtaataatttttcaccttctacatcaatgttaggcatgattctgtttacccacttaggtaaataccaagcatgtttacctaaaagagtcattaccgccggtactatagttaaccttacaataaatgcgtcaaacaacactccaaaagctaatgccataccgacggattttatcattgtgtcaggagtcgccatgaatgcaaaaaatacagtcatcataatcaatgcagctgttacgactactttgcccgaatccttaatcccttgtaaaacagcttcttttgcatttccagtttcactaaaaacttctctcattttactaactaagaataactcatagtccatagctaatccaaaaagaattccaatagttacaacaggtaaaaatgataagatcggaccggatgatggaaatccgaatagttcaattaggttaccatcttgtatgacaaaaaccataaaacctaaagtagcacctattgataaaacaaatcctaacacggcttttaatggtacaattaatgatctaaatacagctacaagtattacataagctaatacgataattaaaccaccgaagattggcaatgcttcaaataacttggtcgaaatatcaaaattcatagccgtagttccactaaccataagattaatgttatcttcgttttcaacgtcaactgcatattctctaatatcatctataacatctttagtttcttgatcgtctggtccagtattaggtgttacgttaaaaagaaagaagtcttgtgattcattaggtattggcccgactactgaacttaccccatctattccttcaatgtctgttaaaatttgacctaaagattcttctgtattctcaatgttagtaggaacctcggctccaacaattaatgcagaatgaataccttcaccataagcctccgtttgtaaatcataagcttttctttcagtggtatcttcatgattggtcatctcagttgatggtaagcctaattgcaaattaactactggaatactaatcaatataagtaatcctaatgaaaccagtactacacttttggggcgtcttactataaactctccccatttatttgatgaacttccgtttttattcccttttttagataatcttcttaataatttattttcattgtccggactaattttgttacccagtaatgacataattgctgggagtacaagtatagatacaactactgataagaatatgctaatggctgatgttacacccattaccgttaagaaaggaatacctgtaacggctaatcctaatacaccaataataacagtgataccagcaaaaacaacggctgttccagctgtaccatttgcaatcgcaattgaatcaacaatgctattcccttttgccctttgtatcttaaatcgattaataataaatagtgcataatcgatccctaaagccaaacctagcatggcagctaacacgatagagacagattgaatttcaaaaatatgtgttcctataacgatcgttaataaactaatacctaaccctagaatagctgaaacaattggcaatccagctgtaacaaacgatgcaaacatgatagacaaaattagaaatgcgattacgactcccactgcctctgtcatatgagaaaagccattcgcactaaatactactgaatcactaattagttctgactgaatatcattatctcttgtaatatccaaggcacttacaatatcatctttagtttcttctgaaacttctgccccagctagatcgagatacagttcagcatatccaatcatattatcctcactaatatttcctaaatcccaaggtggaataactccttccacatgagcaatatccatcaactcagatataagttcacctatatttccttgcaccgaatctgaatttaaatcttctccctcaggagctttaaatacaatttcaatagtactggtttcatcatcttccataccatcactaaaattttcggtaatgaatgttgccgcctcatctgccggtgtacctggtatagtcatatcctcttcgaaatttaaaccaaggtttaaaccaacaattgcaagcaatactagtattgcaaccgttgaaaaaattactttcttgctatgagtaattgaccacttagcaatattgaaaagtttatttgccatttctatatatctccctctatcccaaatttaaaactaacaaatgtaagtacatttgttatcataacaactagatattatattcgcaagcatttaatgttacaattttaagaagtagtttaaattaaggaggtatactattggaaaaattaacaagcggtttatctcaatctcaaaaatcaattatgcaggcagtagctaccctattagaaaaagaacaattaaaaaaccttacaatcaccaaggtttgcaaagaagcaggtgttgcaagaattactttttataaatattacgacaccattaatgacgtcattgaagctacagctcacttgaaagtaagtgagttattcatgcaatttagtaannnnnnnnnnnnnnnnnnnnnnnnnnnnnnnnnnnnnnnnnnnnnnnnnnnnnnnnnnnnnnnnnnnnnnnnnnnnnnnnnnnnnnnnnnnnnnnnnnnnatttagtaataatacaattgaagatttagatgactttattaatggattaactttaagaatttcaaggagtaagagtagtattaaaaatatgttagaccttaatatgtctcatattttattagtacatttcatttatgcaaccaaagtttacttagagaaaagtaacttaaaggtaacaagaacaaagcttaatttttttgctggtggtatattcaatgtaatctctgaatgggtaagggatgatttatcactcgaggatgaactaagaggtcaattaatcgagatatttgaatatatgcgtgtacttagtaatgaataaggactaataaatagttcttattcgtttttaacttgaatcgattattttaatttcatacttgcaatccctaaaataaaaaaagaccaaagctttaaaagccttggtactcctacatttcttctgtatgcggttgagaggactcgaacctccacgggatttaactcccactaggccctcaacctagcgcgtctgccattccgccacaaccgcgtattctggtgcgggtgaagggacttgaacccccacgtcataaagacactagatcctaagtctagcgcgtctgccaattccgccacacccgctggcaaattaatttaaaatatagatggcggtccggacgggactcgaacccgcgacctcctgcgtgacaggcaggcattctaaccaactgaactaccggaccttgttgatggtggaggatgacgggatcgaaccgccgaccctctgcttgtaaggcagatgctctcccagctgagctaatcctccattctgactgcagataagcggcgaatttcttcgtccaattcgtgcctctcagtcagtcacgtacgtttgtacgctccttccctcaagcacttcttgtcctcgaacttcttgcttctctttgtcaaacaatgatgctgataagctgcaaatcttttcgtctcgttgttcattctctaacagcgattgaaacgaactggtgctggaaaggaacaatggaacagaacatgtccattttcctttcagcgcctcgttttgcaaatgacccgtacgggattcgaacccgtgttaccgccgtgaaagggcggtgtcttaaccacttgaccaacgggccagaagagcggagaaggagggatttgaaccctcgcgccgcttacacgacctactcccttagcaggggagccccttcagccacttgggtacttctccatggctccacaggcaggattcgaacctgcgaccgatcggttaacagccgatagctctaccactgagctactgtggaatatgtacgcttttttccgcctctccttggcgactcttataatatagcatagtcacttcctttgatgcaatacttttttcgataaaaattttagtttcccgtggcaggtaccacaaacatatttttgcgtattgatttttcgccgccggtggtatgttcggctacaagatgtacatgtatacacaagaacggtctgttcgtcttgcgctgttttgcagtagcgaggtgctcctgttttggcaagccattcctgaaaatctttatcgccatgtttgtagcctttcccttcgagatgaaggtggtaatggcaaagttcatgtttaatgatgccgatcagttcttctttgccgtagcgctcatattgctttgggtttagctcgatatcatggctttttagcaaataccttccccccgtcgtgcgaaggcggttattgaagcgggctgtgtgtgtaaaagggcgcttaaaaaaagcaagagaaatcgtttctgttagctgttgcaattctttgtttgtcattctttgtcctccattaaaaactattcaactctgacaaacagcccaacatatactacttgaaacatgagaggagcgttcgatatgcctatttggttaaagaaacagcttcgtaaagcgtatgctgaaaaaaatcgccatcaattgaagcttttaaatcaatgttggttttattataaagcaactcatggagaaaacacgctttctcaacataaagaaccgatgtagggagcttgagacgctcccttcatgcagttagacaacaattggcgccttcattgtcaggctgatgcgtccttttttctcgtcaacgtcctctacccaaacagtaacaacatcgccaatggatacgacttccatagggtgtttaatgtagcggtccgacaatttggacacatgcacgagaccgtcctgtttgacgccaatatcgacaaaggcgccaaaatcgacgatattgcgcacggttccttgaagttccatgcctttctccaagtcctccatcttaagaacatcttgttttaactgtggcgccgctaattcatcccgtgggtctcggttcggacgggcaagtgcgtcgataatatcggctaatgttaacgtgccaatttcaagtttttctgctaattcgccttgattgaggctgtttagtctttgtttcagtttgtctgtgccaatgtcttttggctctgcctctacatactgaaggagttttttcgcctcgttgtagctttctgggtgaatggccgtcgcatccaatcgatttttgccgtctgggacacgtaaaaagccaatgcattgctcatatgttttggcacctaaacggggaacgctctttaacgctgttcttgttggaaatggcccgtgttcgtctcgataggcaacaatgttggtcgcttgcgttttattaagcccagccacataagaaagcaatgctgctgaagcggtattgacattgacgccgacacggttgacggcggtttcgacaacaaaagcaagcgactcatttagctttttttgtgacacatcatgctggtattggccgacgccaactgattttggatcaattttgactagctctgccaacgggtcttgcaggcgacgggcaatcgagatcgcgctccgctgctcgacttggagatcagggaattctgtgcgggcaatttcagaagcagagtagacgctcgcccccgcttcgttgacgatacaatagtaaagcgtatcatcgatctctttaatcgtatttgcgacaaattgctcggtttcacgggaagctgttccattgccgatggcaaccattttaacgccgtattttgtcgtcacattccgtatgatcgctgctgcttcttccgttttatggtgtggcgctgttgggtacatgacccctacttcaagcgctttgcctgtagcatctacaaccgcccatttgcagcctgtccgaaaagctggatcgatgcctaacacgactttgcctttcattggcggctgcaagagcagttgctttacattttctgcgaaaatcgcgatcgcctgctcttcggctttttcagtcaaaaatgcccgtacttccctttctagcgaaggctcgaccaaacgcttgtatgcatcttcaatcgcctcttccataatgggaacgaccggtgaaccatgctttttgataatgaggcgtttaatttggtcgataaaggcatcgcttgggaagcgtacgtgcacgcgcaatacctcttctcgctcaccgcggttaacggcgagtgtccggtggggcaccatttttttaataggctcttggaaatcataatatagggcgtagacgcctttttcatcttctgcgccgccattttttcggcttgtttcaatggttgattgctttaacgcccgttcacggagcgtcgaccgtatttctgggtcttcggcaaacatctctgctagtatatctttcgcgccagcgattgccgtttcactgtctggcactcctaattcttgattgataaagggcgttgtcgctgtttctagcgaaaattctctcgggaaagatactatttcttgcgccaatggctcaagccctttttctttggctgcggttgcccgagtgcgccgcttttgtttatatggccggtataagtcttctaatgtttgcagctttcgagccgctttaatttgcgcctttaattcggctgtcaatttgccttgttcatcaatgaggcgaagcacttcttctcgccgctgcatgacgctttcagcatattcgtgcgcatctgcgattgctttgatttgcaattcatcaagaccgcccgtttgttctttccggtatcgagcaataaaagggaccgtattgccttcctttaacaactcgacaacttgcctaacttgtttcggggctaagcctgtttccgttaccgtttcgtttaccaattcctccattgccttaccgtcctccaatctccgtttatcatagcacaaaagcaaataaacaaaaaagaaacacctcgccctgtaaggtgtttcttttcgcttatcgccctatcccctatgtaccgctgcaggcactctaaatttgccgaccattaacgtcgcgtcatctttttgattaaaccgtttggctgccaccacgttctcacttacgttgtataagccactctggtcaattagcgcttgttttggcggaagccggtcgacgccatctgtatagatcataaaggcgctaccaggagaatataagaacttgtcgcttttgattttgcttttgcggccacacaaatagcctcgcgtcggcattggctgaataaacgagccatcaggatggaataagacaaagccaatgtttccgaagtttgcgtaatggaggatgttgctttcgtaatcaattttaatgactgtcataacagccccccgttgatggatcaaagccctattgcaatgttcaagaatcacatcggcagactcagcatgatacgtttgcaccgcttctagtgccgtcatagtagaatggtatgccccttggccgctccctaaaccatcgacaacggcacatactgtgtatgtgcctttttggatcaccatgtgcccgtcgccgcaaacagcattacctggtttgatttgctggacagtcgcaatatccgtatattggtctttaaaatacgttagcatttcagaaaatctccgtaggctccacacgtatggagtcgcgcagtttttgaagtgcacggcgttgcaaacgggatacatgcatttgtgaaatgcccaatttttcgcctgtctctttttggcttaaattctcataataggtgcattgaagaatgtccttttcccgttcgtttagcacctcgaacgctttttcaagcaataacttttggtcagcttgctcatagccagcctcttcattgccaacaagatcaaggagcgtcacttctccgccttcttggtctgcctcaagagggcgattgacggatagtgcttggtaacttttgctcatttccattgtctcaagcacttcttcctctgtcacttgaaggtactcggcaatttcatgaacataaggggaacgttgcaactcaatggttagcgtatccgctgctttcttaatttttggccccagttctttgatgcggcgcggcacatggacactccatgttttgtcgcgaataaagcgcttgatctctcctacaactgtaggaactgcgaacgattcaaagcttctgccatagtcttcgttataacgtttcattgcggcgagcagaccaaccatgccgacttgatacaagtcttcatcgtattctcgcccttttgaaaacttcctagaaagggagcggacaagcgcttcaaaatggtttaccaatttgatttgggcttcttcacttccagttttttggtattgttcaatccaaagatagatatcatccttgttctgactgtaaggaagagattccgtcgacactttcctccaccccactctcgtaaagatactttgtcatgacgagcatcacgccgttatcttcattgatttcaactttatccattaaactgctgatgaggaataaaccaagccctccttcctttaaatctccaactggctttttcgcatcaactggacctagtcgactttccacatctttaatgtcaaaactcttgccttgatcagcaacgactacttgaattcgatcatcataaatataacaagctaaataaatcgatccaccttcagaataggcatgttctacgacattcgtacatgcctcggcaactgcgatcttaatgtcttcaatatcgtcgtaagaaaaaccaagacggttcgcgacgccagaaacggttaaacgcgcaatgctgacgtattcgggcttggcagggatttccacgtggatacggtcatgttgttccattaactctgcccctccttcacttcttcaatcgtaatcacttcatccagtcccgttattgaaaatagccgtctaactcgactagacatgccacaaagctttaagttgctgccatttgcatccgttgttttcaacacaccaacaaaaacaccaagtccagtgctatcaatatattccacctcattaaaatgaatcgtcatctcaatacctttttcctttgctagaggaatgagagattcacgtagttgaggagctgtataagcatcaatctcgccagcaaggtaaatatgataggcgttgtctgtttgttctgatcgtattgtaaggttcatatgtaaaccgtcctcctcaagcaattaagttccatttctctttcatacccggccactcctatttttaaacggtcctccgcaaaagaataagcgtaaaatcatcacgtaatacaaaatcttggatttttacaagttcctcataaacgcggttgaccgtttcttgggcaggtaaatgcatatatttacgaattaatttcgtgatttcttcccgctcaataaattcgtcgcctatgcggcattctgttacaccatcagacaaaagcacaataaaatcgcctacatccaaatggcgggtatattctttatatttggtttgccgggacacgcctaatacgagccctttggcgtgcaattcttcaaatgcatcgttggccacgctgtaaaaaaaacctggttcgtggcctgcacctgaatagtggaaatcaccagttgttctgttataatacccgtacatcatcgtaataaacatgctgtctccaacgttttgggcaacaacacggtttaaattttcaagtaaaagcgaaggttggagttgctgctctgacggcaaactgtccatcgcatatttgatcatagacatgcaaagagccgcaggcacgcctttgccaataatatcggcaatagccatacccagccctttgtcatcttcatgtacataatggtaataatcgccgctcattttctttgctggtttacaaacaacaccgacatcaagaaattctgtttctggcttttcttgcgggagcagagtctgctgcatactagctgcgacatcaatttctgattcaagttcttgctgtcggttcctcaatacttgatgttcttgataagcaagcccatatcccatcatgacttccaataggagaacaaacgaatcttgaacttgctcgtccaattgagggagcatttctgtcaacactttaaaatggatgctgacaaattcttcaggcgaaattttttgctccaacaaaaacttgcttactttttgcgcctcgtacagactttgttccgatttgttctctaaaaagtctttcaagatgcgcttataggaaagctgtaacttatagtctacaacagacatctatctcacatgccccctcatttgggcccattttgttgccgtgatcgttgttcctacgcctatttctgaatcaattgtgaattcatccataagccttttcacgccaggcaaacctgcccctaggccgctggaagtcgtaaatccatctaccattacttgccgtatatcttgaatgccaggaccatcatctttagcaatcacacggatgcctttgatgatcccgaggttggagggtttctccaccaattcaaggcgaatttctccccgcttcgcatacaagtaaatgtttcttgctagttcagaaatggctgtcgtgatccgagcttgatcaacactgccaaagccgatttggcgtgaaaggtcgcgccctgcctgcctagcagcgacgattccccattcatttttcacttccacacaggattggatgtccatctctaaccctccaattcctgttgcaagcttgcgagtccttgttcaagatctaacgcggttgaaacaccttctaatttgattcccatatcaattaatgtaatagcaacagcaggacgaatgccggtcagtacgacacgagcccccatcaaattggacatgtcgacaacatcgccaagtactttggcaatgaacgagtcaatcatatcgacactcgttaaatcaataacgactccttttgaaccttcttcgtggatttttctaagcaaatcttcctgaaattggagggcagtttgatcatctaactcaatttggatgctgattaataaatattgtttgagcttaagaattggaatcctcattgcatttccaccttccatcataaatcgaccactttctttcctgtcatttctaaggccaacacaacccctttgcgtagtgtgctctgcgttggaaatctagccaagtcaatgcccaagttgacaatggtctgggcaatttcaggacgaatccccactaatacagccttcgctccaattaaacggacagcttcggaagcttcaatgatatgttgggcaaccattgtatcgacgaccgggacacctgtaatatcaattaaaacgacttttgagcggtgttcgatcacgccttcaagcaaattttccatgatcagtttcgctctcgctgtgtcaatcgtcccgattaacggcatcaccgtaatctcttcaaaaacaggaatcagcggagcggataactctaacagcgaaagcttttgcatttcgatcgtatattcccaattccctgcataatcgtttacaattcgatccgtccgttcatcaatccattcatttaattccgctaacatttccacagcctgactttcttttacatcagacgcaattacgaacctttggcataccttcctaaacaaatgcatcgattttgaaaataagattagtgaaccgccattttgaataaaacggtcgacatgctcttttaattccgcataataactgtctttatgcccttcagccgtagacagcaccaattccattagttttttgttcgtatgttcaaacgcatcgttaggctgcgtttgcaaatcactctctgaacgaagcttcgcccattcttttccccattcctcaataagtcttgtccggttttttaaaagataagaagcaataaacgattgcatagccttcccctttcaccctgtatttctctactgctattatttcatgagtcgagatcccatgcaaagattaatcgtttccagcgatcgtttttctcagtgtttgacaattccacattttaaggaatcgttcttataaatggcaaataaaaaaccctgtacgagtgctgtccccagttagggtcactacgatgtacagggaattgcctgaaaaaagattcgtgatgcacaccaaataaatggttgccacgctttcttttatcctcaaatgtctaaaaatcaattaatcccaaactgattgtgagtgccttgtcaacagacctcatcattttgtcgtcaagatgggtaattttatctgtcagtcgttgtttgtcaatcgtgcgtacttgctcaagaagaatgaccgaatcccggtcgaacccatatttgctcgcattgatttccacatgtgttgggagttttgctttttggatttgggctgtaatagctgctacgatcactgtcgggctaaatcggttaccgatattattttgtatgatgagtacaggcctgaccccaccttgttctgagccgacaacgggggagagatctgcaaaatacacatcgccgcgtttgactatcacatcgctacaccccactaacgagacgcgtcagcgtatgattcgcttcctcctcagcaagaaaggcttctgatgcaattgtaagattgattttcgccatctccatatagccttgttgcattgactcacgaatttcagcttttagttttgcacgcttattgctgttttcttcgttgtcccacttttcctgctcaagcacagcatccacctcatttaatcagtgtaaggcctatttaggcaattcgtttctacgtccgacatttcgccgcaagttatacatcatttatcatagcattgccaataggtctttgcaaagctctttttcaaaatcttgctttgctatttagccattatccattctgttggtcatttttcccttgctcttctattttatgcataacccttgattctatttgcacagattgatatttgccgttttttacgtaaatacggggcaagcgaggattgagcatacaggcagcttcataattaatcgtatcaagccgcttcgcgacgtcatcaagctcaatctgctcttggccgtctttgccaacaagagtaactgttgtaccatttggcactggctcagaaagttcaatcatgcattggtccatacagattctccctgcaaagcgcgctgtttgcccattgacgagtgcatacccgcctttcgtgctgttttgccttgcccagccatcagcatagccaattggcaacgtcgcaatccatgtcggtgcttctgcttgataagtagctccgtaactgacagcgtcccctttttgaataagcttcgtgaaaactgtttttgtttttagcgataaggctggaataagcttaaatggcagtgcttgttttatttctactgaaggggtgagcccatacatggaaatgccgaaacgtaccatattgtacatatcgcctggatagcgcatgcttgctgcactattgccagtgtggatgaacggaatcgaaacgtttgcttcttccaatttgtcaacacatgctgcaaaccgttcttgctgttttcggtaatacgtatgatcgagctcgtcagcagtggcaaaatgggtaaacagcccttcaacaacaccgattttttgcgcagcacagacaaccgccatcgtgttttcaaccgtttgttggcctaggcggcccatgcccgtgtccattttgacatggatacggagtggatcgttcggtgattttgccagaaaccgtgtagcctcttctagccattcttgctcaaatacagttaccgaaatcccctcagaccgggcaagctctgcattttctgggcgtgttttaccaaggacaaggatcggcgcctgaatgcctgcctttcttagttccaatgcctcgtctaataaagcaacaccaagaaaggtcgctccagcggcaagcgcctccttagcaacggctatagccccatggccataggcgttcgctttcacaactgccataatggcgacattgtggccttggcttttataaaagcgcgctagcgacgaaacattgctcgaaattgcattcaaatcaacctcaacccatgtatccctaaagaaagggagtgccgttcgatccatctaattacctccaggacagttcacattctcaccctagtataaaagcttaatggaaaattgtcgaacggtgtttggcaacaacgtgcctttgtttatatataaaaaagccacgagttcgctcgtggcttcagactgtagacagtggttacttttcggtcgtggcgtaaacagagcgcgccacatcggccatctcttcttctgacaagctctctgaaatcagggagtagtcgatgccttcatgggaccacataatacggtcagccgattggattccaatcgtgaaaccgaggtcaacgggttctccctttactaaatttaagggcgctgttgtcgctgggacgatcgagctcttctcttgaatcagtgtaaaaggcttatcgccagaatattgttgcacataagctgtacgctcgcctgtttcgacggtctccaatttaggctcactatcgactccatctgggataaacatcgggtagcgaatcgaaatttcttcctcttcttcaggagtagccattgtcggttcggacatttgtgcgccatccattgttttttctgtattaaagtcttcattcgacagctctggatttctctcgaattcagtaaacgtcaagtcgactaaaacattgttatccgcatccataatcttaacggaaactggcgctaaatcttttttattcagccggatttcttggctgtttaagtttttgttttgatacgttgtcgctgttttaaagacataatggttttcgtcttgtgaaaacatgacatcagcgtcaaggctaatatcctttaaaagcgattcatacagataagcttggctgctcgttttgggccaatcgctttggaaacggaatgttttgtttagcgctggggtcaaaacgaaaacgccgtcgtcattttttaagatgatttgactttgttcgtttttcgcattttttaaatcaactttgtaataagcgttatctttttgccacacttctacatcatacgtctgtggttcttggcccgtttccagcaccatcgtcgcctttgacttgtagctctccgtgttttctagggcctcttctacgtcgtttaaaacatcctcttgcgacttttctccacacgctgccaatacgactaccattaggacagcaaccatggccagccatgatttcgtcttcttcatgcctaccttcaccccttcggctcactttaggcatggacggcgagtccattgccctgttgctgtaaactatatgagccgaatgacggcaatatgcagacgagtattgacaagtagcatttttatgtttcaatcacgacttgtgcagcagcgtattcttttgaatgtgtaatggaaagatggacacgggcgctgtcgtcgtttaccacaatatacggttttccactgccttcagtgcggatttcaatatcatgccaggaaaggccggcgccaattccagtccctttcgctttcgcaaatgcttcctttgcagcaaaacggcctgccaaatattcaatttggcggttcggcgctagctgtgccatttggtcttgttcataagaagtcaatacccggcctgggaatcgaggctgtctcgcaaaagcagcctcaattcgctttagttcaattaaatcaatgccaatgccaacaatcatttgcacaccacctgtttatcattctgtccggttatgcggcacaaggcgcaagctgctataatgagactagttcatgatggtcatgacaccttacacggctaatcaccaaaaagggggaatcccatgtttcaccgcaacgaaaccttttcgagctatattcgcaactaccctgtgatcaccgccattatagcaaccaatgtgatcatttatttcctcttcctcattataccttacgggggctggcttcactattctgggatgggatggaatgcagcgattctcgcaggcgagtactggcgcctcgtgacgccgatctttttgcatggcgggctgttccatttgttttcaaacatgttcgctttgctcattttcgctcctgcacttgaagtgatgcttggaaaacgaaaatttgtcaccatttatctcatttcaggcgtattggcaaatgtggccactttgtttttggaatcgccaagctatacccacgtcggtgcatcaggctccatctttggcttatttggcgtctttttgtttatgtacctttatcgtaaagatttaatggatagccagtcagggcaaacgattcttccgatcattgtcatttctgtgatcatgacgtttgtcggctcccatattaacatttttgcccacttattcgggctgttatttggcttcttgctagcaccttcctttctaaaaggagctcgtcctttttatagccagcaaacgaccagtcgtgttcgccgcgcttattttgacgacgatgaaatccagtttaaccctcagcgctggaaacgtgcgaatagcaatcggaaactgaaaaaagtgttgtgggtgcttgcagcgattattgccattatcctattgggaacgattcagttataaggggctttgtgcccttaaaggctcatacacatcacccgtcatagcgatacgtttgtccgcatagaatgaaagaaagcttggctactgagtgggtgagggtgatagggtgataaaaggacttcgttacgtaatagtgttgtttgtaggctgtttgctaattagccttgggattaacttattttttgtttcctaccatttgctagacggcggcattattggcgtcggattgatcgcccattacatctgggattttccagtcggtatgaccataatcgtcgtcagcattcccatttacattcttgcttggatatactataggccgtttttttacaactcactggtaggcgtcatcgtttcttccttaatgatcgattactttgccgcttacataccggctactccccttttgcctccacttcctagcgccatcatcggtggcctgatgctcggcataggcgctggtattatgtttctcctagaaattagcactgggggttttgacttgctggcgcagatgattgctgctaaaacaaaatggaatgttggtgttttaattgtcggttttgatttaggagcagtcgtagctggcattcccattgtgacacacgatgagatcatcttatccgcaattgccgtcattggtactggctttgctaccactgtgattacagccgccggcggcgtgaatggccatggcagcatgtcagcgaaataaaaaaccgtcgcatacgcgacggttttttattcttcagagcgatcaaacatatcgttgtctggctcgaaaaagcgaagtaaatcaccataaataattttatcggagtactctaagtctgattgcgcacgtgggataaactcttcacagcttgatggatcttccatctcttctcctgtatgtttgtcataacacgtgttgctggcatacacaagatcatccgtgataaagttgccgttacgtaaaaccgcataagactcatgttctggcgaaaacaagtcgctgccaaactggatgtcctcttttgtcgacagaccgagcaaatgcatgagcgttggcttaatgtcaatttgcccgccgactgtgtcaaacgtttccccttcatggcccggaatatgaatgatcagtgggacacgttgaagctggacagaatcgaatggggtaatctcctctttgtcgaggtacatcgccattgccctgttatggttgtcagaaattccgtaatggtctccataaaggataaagatgctgtcttcatataggccggcttcttttatatcctcaaaaaactgctccactgcataatccatataacggacagtcggaaagtaacggtttaacgtgccgctgttcgaatcgtattcctcgatcattttgtcttcctcgcccagttcaaatggaaaatggtttgtcagcgtaataaactttgtataaaatggctgcggctgttccttgagcaagtcaatcgactgttcaaaaaactccttgtcttttaagccccaaccgaccgaattttcttccgttacttcataagaatccacgtcaaaaaagcggtcatagccgagtgtgttataaacgacatcacggttccaaaacgttcggttattggcatgcatgacagacgagtagtagccattctcccctaaaatttccggcaacgcattgtagtcattttgggcatgggtaaagaacacggctccactgcttcggccaaacagcgaattggcaacaataaactcagagtccgatgttttgccttgttccgtttggtggtaaaaattctcgaaataataactttcttcttttaattggtttaaaaacggcgtgatttcttgtccataaacatcgttgtcaatgacaaaactttgcagcgactcaagagaaatcataaacacatttttgccttcagccacgccaaataaatctgggtttggctctttatggtttgcctgtgtatagtttttcacttcgacaatgtcggaactatcggctaatacacgctgtgctctcgattgtgattgcaaaaagacgtcgtaaatatggaagttaaaaacgccgatgtttttaacgatcatatccctgtcaaaagagcgcgtaagcagttgtggacgttctgtttgcgctagggatagattccctaagaatagcaagatcgccaaagcaaagatcaagctaggttctctttttaagcgtcccactacaggcacttttttacgtgcgaccaaaatccaaagtacagcaacatttgtaaataagaaaacatcccaaaagctcatcagttcaaatacgctgcccgataaatcttgcatattgttagtttgcagcagtacaggaagggtcaagaagtcagtatagaaccgataaaacaacaaattgacgtacaaaatgagtgaaccgacaaacgataggacgacaaccatgatgttgcgcattctgtttttgaataacagggcaatccctaaaagcaggacagacgaactgatcggattaatgagcagtaaaaattcttgcatcatgttatcggcagggatcgcaaacgcgactttgtaaagcacgtacgttgtaatggttagcaacgcgacagccagccaataaaatgtcagtcgcctgaagccggctttaatttttgtcatgaattttactctcctctcatgaactttgcgtttaaaactacttccgcctaactgttatctatttggcgggccagaaaacggttttatctatcatcaagcaaaaacagtcatttgccattcaagcaatcagtttatcaaaatttctgctccttgaacatagttcctttgacataccgaactttcacatcgtttttacaacttcttgacattttctagatattcttcaagggtaataaagtggttgtaaatgtcgttggccacatcgcccacatagcgcaagtgccatggttcatagccgtaccctgtaattccttctttttcggccggatagcgtataataaagccgaactggtgggcgtgttccgcaacccactgcccttctgccgttaaaccaaatgcctcaatcaagccataatcgacagaagcgctgctaatatccatcgctaatcccgtttgatgttcactgtgccctggcatggccactaaatcttggtcttctccttgattttccagcgcttcttcatataaaagctcttgccgttcatatgatctaaaacctgatatggcaaacaggtcatagccttcctctgctgcggcagcaaacaatgcttccaaagcttcggcagcttccaccctgagataacgcctgtcatcttcctcatcaaaaggaaaaggaacattcggtatggttaagtcgccaggtcgataatcttcgggaagacggtagtctttattgacgttgaccacaatattgtccggattcataatggtcatttgcccatttacgacctcggtttcgttaaaataacgctcttctaagaaaaaaacaggtgcagaatcgccgccttttttcatttccttttcatgtagttgcggatgagaatcgcctccacaagctgtcataaccacgagtgcgcaaacaaaagggataacaagtttgagcatagtcctaccttcctcaaaggtttaatttcttcactatagcacagctcgtcccgatagaaaatccccttcaggtaggatttattgacgatcattcaacggtttgccataagcatagacagggtatggcttggttaattgttccgctagttgtaagcttggcatatccattattgtatgttagagatacaggttctatgtcttagtgtgtcgctttctgttttgatacccaaaattctgaaaacgaaacacgttcttccttttttaaaccgtgtaggtgtaaaaaaggaagaatcgggtatcaagagggaacagaaaaaattggagggacgattgcaatgggccgaaaacgttattttgttacaattgatatggcaatgatgcgcctctcgaccacaaaaacgcctgacaactcgatccaatatgagatctatgcaactgatgaggaagcagacaaaattaaagcgctgctggagcaaatccgatctgaagactttcgtgaggagcaagtttttcaacacccgttccaagaaaagaaagccgaccaagaaaaagaagccacacaaaatgaacttcaagagttgtatcaaatcatttatgatttagggacaattgaaacaaaagaagtcgtgaaagatttaaaataagtgagcgatgtaaagggagcggcaatttaataagccgtcttcctttttttgtggtacaattaggataacgctttcaaaaggtggttagtacaatggaaatgaatggattcatgggagggatttacaaagctgccgagtggatcatgcggcttgccatcgtcaacttgctttggcttgggtttacatttgctggactgattgttggcggtttgttcccagcaacacaggctgcctttgccatttgccgccagtggattcgtggagaaacagatattcctttgtttaaaacattcctttcgtactttaaaaaagactattggaaagtacagcgcctcggctggatactcgccctaattggttttgtcctagtcgttgatgtcatgtttatttacaaccataccaacccttatgtgacgatgctcgccatgccgattcttcttctttgccttttgtatatattaacagccgtttacgcgtttacgttatttgtccattacgagatgcccatttttcgcctattaaaacatgccgtccttcatgtgcttgttcgtccttttctgagcataggcatgctaattacttcatttggtatctctgtactcatgcttcgttttccaggcgttcttccttttttcggtgtgtcagtccccgtctttttactcatgtggttttcccatacgggatttgtccgcaacgaagaaaaacaacggagccaagcggcatagcttggcgctgattttgatgtgcctttctactgggaaaagcctatttcgtaaaagccagctaacgctcctcctctatttttgttttttgtcgccttgcattttctatagaaaggacagatcgtccattgcttcttatatcgaaaaaaacggcacgggcctttttgcataaaacgtttattgccacacgctattcaagcatgcccgaccttctcaatggcttggaagcgattcaacttgatcctgttgcggttattgagcgtaaccaccatttgactgcaagtttgcgaatgaaacggtatgacccagctgaattagagcagctgcttgaaaagcagcaagcattcgaatactacgcccaagctgcctgcttattgccgatcgccgactttcccttgtttgaagatgtccggcagcggctcttaacagcttgtgcttccgatttatccgcccacaaggatgccattcgcgtcatattcaaccggctggcaaccgaaggtcctctcgcttcaaacgcctttcaaagcgaacgaaaagtgattggtggttgggatacaaacagcgcctccactaaagaaacgtctcatgccttgcaattgctcttcctaacagggcaaatccaagttgtaaaacgccagggggcgaaacggttttttgcattaacagaagacgcgattccacaccattacttgaaatcgcctttgtcgacacaagaacggacaagggcgttactccttaaatatgcccgcgcgtaccggttatttagcgctgacgatccccgttatggatggcagaagcaccgagctccaatgcgaaaaaaatggcacgcacagcttgttgaggagggcgtcttgactgaagtggcgattgagggcgtaaaacggccttatgccgtgctttcaacagatgtggacgagctgctttcacatagcgacaaccaacctaaaggcattgccttcctatcgccgctagaccctcttttatggcggagagaacgtttgcaagatatttacgacttccactaccgctgggaaatttacacgccaaaagcagcccggaaagtgggctcctatggaatgccgattctctggcatggaaaactaattggccaaatttcgccattaatgaatcgggaaacggctactttacatattgaaaacattgtggttgagccgtcattcaaatggactccaacgagaaaaaaagcgtttgcccacgctttggaacaattagccaagcgtgtcggcgcaaaacaagttgcctatgattgtttattataggtgaaaaaatgaaacgcccacatggcttgggcgtttcattttttaagacaagcgttgtatgttgttaaagctaattgaaatgctttctagaggggaacgctcacaaatgtcctgttcgacaaaaaagtagcgagcgcctgcttctttccctgcctggataatgtcttttatatccaatgttccctctccaacttcggcaaacgacttatcggttgctttcatgtctttcaaatgaaccattggcacccgtccagtgtattggttcatgtaacgtttggcatccacaccggcaaactcgacccagtacgtatcacattctaattgcacatgttcctctgttgtctggcttaacaacaaatcaagggcatactcgccatcgaatgtttgcaattcgaaatcgtggttatggtagcaaaatccaatgccagcttctttgcaggcatttccaatcgtttcaagatctttcgccaattcgaggtaatcgtcttttgcctgccgctcttctggcgttaagtatggacagacaatatattgaacgccgacttctttatggtaggcaagtacatcgtcaagagactcacgaagctgagcaagaggcacatgactggaccatgcttctagaccaacttcctctaacattgcttttatctctgaagcagagtggccgccaaaacctgcaaattcgacacccgcatacccaatttcttttacttttgctaatgtgcctttaaagtcttttgccagctcgtcacgcagtgtaaataaggcaattccccatttatccatgcttttcccccttatttgatcgttgctacagacacaaacgttttggacttcgttgactccagcgctgcaaggacagtgcgtagtgattccattgccgattctcctgtaatagaaggcgtgcggtcattggcaatcgcatcaacaaactcgtcaatcacaccacttgcaacttggcctccagcttcattggtggcaattgcccccactgaatacctttcaatggtgccatcggctagctttacaacaacttggacattaggatcatcgtggatttccaacacgcctttttcgccgtaaatcgttgtcgtgttgtcttcacctttgtagtacgtccaacttgccgccattgtgccaatggctccgttttccatgcgcagtaacgttgtcgcattatcgtctacatcggcatccttatcgagcgtctcaacaaatgcagccacttcagccacttcttcgtcaaaaagccagcgcattaagtcaatcttatggacgcctaaatcacccattgccccaacaaaagccttgtctttttgaaagaaccatgtgtctttgccttgaatgctccaggaatcagggccgccatggccaaatgtcgttttaaatgttaacggcttgccgatttttccagattgcaagatttctttcgcttttacatggggcggcataagcctttgattgtgccctatcatcaacttgacattgttggctttagcggcgtcaatcatctgttgcgcttcttcaatcgaagtagccattggtttttcgcacaatacatggcaacctgcgtttgctgcatcaatcgacacttgtgcatggtccacattttgtgtacatacactaactgcatccatttttgcctctttaagcatcgcttcgtgggagtcgtatacctgcttgactccatattgatcagcgagtttttgggcgacttcgatgtttaggtcacaaaaagcgaccagttctacatttggattggccgcatattcaggtacatggcggtggatggcaatcgacccacagccaactactgctactttcaatttcgacattgtctttttcctccttacagccaccacatgtctggagctggctctttcattaaaacttgctgcaaattggcaacggctttttggaaaccttcgtcaatggacattagcccatcttcatgttcaatgctgactgccccgtcataacctacaaggcgcagagcactaataatatccgcccacgttttcaggtcgtgcccatagccaactgagcggaagtaccaagcccgatcttgcatatttgcgtaagattgcatatcaagtaaaccgtgcatattgacattttcttgatcgatgtacgtatcttttgcatggaaaaagtggatggcgttatgcttgcctagaattttaatggctgcaactggatcgattccttgccaccataaatggctcgggtctacatttgcgccaatcgcttcgccacacgcttcacgaagttttaacaacgtcgctggcgaatgcactaaaaaaccaccatgcagttcaagggcgaccttgacattgtgatcagctgcatattggccccattcgctccagtaagggatcagtttttcttgccattgccatttcaatatatctccatactcgttcggccacggggcgacaggccaactaggctgctttgcgccttcatacgcgcctggcgttcctgaaaaagtagtaacggttggcacttctagcttttctgccaattggactgttttcacaaaggcatcatgcgactgattagcaaaatcggcatctggcgttagggcattgccatggcagcttaagctagaaatcgtcaaaccgcgatcctctactgcctttttaaacgctttcaatttcgtctcattttcgagtagttcgcctggattgcagtgcgcgttcccaggataccctcctgtaccaatctcgattgtttctaggccaagcgcttttacgtggtctagcatttcttcaaacggcttttccgaaaataggacagtaaacacgcctaatttcacttttacccctcctctgagatcgatctcatattaaatgataacgctttctagattattgtacttcttttgctgttcgattttaacccctttttttgattttcctaaaaaagatttgcgtttggtctacgtcgaaaacggctatacgaacattaatacgaattctggagggagaaaatgatgctgatccatgcaaaaacgctcgaaaagtacacgatgcgcgccaccgatggggaacttggttcacttgctgatttttatgtggatgcagacacgttgcaccttcgctactttgttggagatacacgcacttggttttttggcggtaaagtcctcttaagtccccatgcattttcgaacgtggataaagaaaacatggccatcgacgttgatgcgacgaaagctcaaattaaagatagcccgaagccagaagaacatgcacccattaaccggaaatatgaaaaggaactgaacgagcattatggctggccactttattggtttgggcccgcagcccccctcaatcaaacatatggagccggttctccagcaagtgcgccgctaatcccgcctgttcatatcccagagcgcaaaaacccggaaggcacagccgatgcaatacggacaggtgcaaacgaagctcaaacagaagcacaataccaagaacaaactcgcctatttagcctggaagaactaaccgggtataccattcatgccaagggcggcaaagtcggcaaagtcgtagatttcatcattgaaaaagcagatgactggcttgtccgttattttgtcgttgatacaggaggttttttgcagcgggagcttgtgctcgtcctcgtggaagacgtcgaagaagttgcttggcatgaccatgcgattcttgtcaagacgagtaaagcccaaattgagtcggcacctgcccattcacaagaaaaagagctgacaaaagaggatgaaaaaaccgtttatgagcattatggcaaaacgccacattggaaacaggaggggagtctaggcaacagccattaaccctttgcacttccacaaaaaagagccgtctgtcaaaacagcagcccgaacgctagattcatttaaacacttgtcagccgataagtgaaggcgagaaaagaggcgaatagaacaggggtcaccttgcataggaaacgattgttcagttcaaagcagctgaccgagacaaacgctagtggatcggggcgtttgtctacagtctaaaggggcgtgcacacgccccattatttatttgcatccgtgtgctcaactggttcgttgtaattttctttgtttaaaacttccttcagttcatcttctacgctttcttccgtaagtggtactttagaccgatatgctgcacgcgtaatcaaatgtcccgccaccggcgctgttaagaacacaaatacaatgccgagtatgaggcgaatgctaatataagcgtctgcaagccaaaaatagataaagcaacctgtcaacgtcaacaaaacggcaagcgttgcactttttgtgccggcatgggaccttgtatacacatcaggaaggcggataatgccaatcgcgctaatcacactcattatcgcaccaacaataatcaaaatagaagccagcagttcaccggttacgcttgcgttcaataatgacacccctctctataaacttcgagaaagcaatggtgctaataaacgcgagaatgcctataattaaaataacttccaaaaacgcttttgtatcaaggataatcgacacgatcgcagcaatcgaaattaaattgacgccaatcgtatccaaggcaacgacacgatctggcatcgtcggcccttttataatcctgaacgcacaaatgccaatagctactgcgaaaagcacaagagatgcgaccatcgccattccaaacattatcgcgtcacctccataatcgctttctcaaatgtagtcattgcccggagaaccgaatttttagattcggggatgtccatcgcatggatgtaaaaaacatcattcgatggggaaatttcaatcacgacagaaccaggcgtcaacgtaagcaaaagtgctaaggccgttatctctacatcactttttaactctgttcgatacgtaaaaattcccggggtgatttttagttttgggcttaaaatttgcttgatgagcacgacgctcgagtaaaagagctcacggatgaaaatgaacaacagtttcactaccgcaaacagcctatgcaaataaaattcgttaaaaaagaaacggcgcatcacataaagaatgccgatccccactaaatagccggcaaaaaacgttgaaaagtaaaactggtcctcatcttgcaataatacccacagaaaggcaatcaaaatgtttagcaaaagctgtccgaacatcgaaccacccccctttgttgtcgatccttccatacttaagcgcctcctcgatttaacacagcatcaatatagacttgtgggtttagcaacgtatttactgcatcttggacaatgccagaaatactttcagcgccgagacctaatgccagtgttgctgcaccaagaagagcgcaagggaggatcatgcctgttctcagtggaaccatctcgtcagtgccaataatcgtttcgccccaaaacacagtgcggaaaatccgcaacagcgaataaaggacaaatatacttgaaatgagcgtaacggccaatagaacaaacgcttggccgtcaatggcaccctgtgcgacaaacactttgccgacaaacccacttaatggcggaataccagctagtgaaatggttgccaggaaaaacagccagcctagtaacggatagttgcgaatcatgccactcatccgttcaagtcgttgtgttcctgataaataaatcgttacacctactaataaaaacaaatacgctttgacgatcatgtcatgcacaaggtaatagatcgaaccttcaatcgccgcttcgttgaagatcgcaagtccgctcaaaataaagcctactgcgatgacaacattataagaaacaattttccgcaaatcattgtaagcgaccgctccaatgctgccaccaaccattgtcacaatcgccataaccgctatgatcgtatgggttagttctggttcgtggtaaaacaacatcgtgaagaagcggaacaatgcatatatccctactttggtaagcaatgccccaaacaacgctgctatggccataggcggcgccccgtatgcgccaggcaaccaaaaataaaggagcaagccagcttttaaactaaagacgagtaagaaaacaatcgcaattgtcgttaggattggtggttgaccagcttcagcaatccgcaccgacaaatgggccaagtttaacgtccccgtcacaccgtataaataagcgatggcaattaagaaaataaaagaagataggacattgacaagcacatacttaattgcttcccgcaactggacacgttctccgccaagcacgatcaaggcgtacgaagcaagaagcatgacttcaaaacagacatacaagttaaacaaatcgcctgttaaaaacgagccagaaacgcccgccaacagcaagtggacaagaggataaacaaacatgttttctttgtctttgcccatggttgagaacgagtaaagcgaacaaatggtggcaatgaaataggtcgtggccgttagcaacaatgaaaacgaatcgccgacaaaagaaataccaaacggaggagaccaaccaccaaaatcaagcgttataatgccttcttgctgaacatgaagcaacaaataaatactaagaccaaaagtaaagagcaacgtcgcaaaactaatgactcgctgccatttgacaaaaggccgcaaaaaaatgagaaggatgcctacaagcagcgggagaaccatcggcagtacaagtaaattattcatcatcatcgagtccccttaactttgtaagatcatccgtgcctaagtctcggtacgtccgataggccaatactaagaaaagcgccgttacgccaaagctaatcacaattgcagttaaaatgagcgcctgtgggagtgcgtctgtgtaagaagttgcttcctccccaagcaacggggcgcttgagtctcccgaaaagccgcccataatcataatgagcaagtgaacagcgtgggacataatggcagtgcccaaaatcacacggagcaagcttttggaaaggattaaataagtggcgaccgtaacaagcacgccgaccaatagagacatcatagtttccataagctaaacatcctcacttatactcagaataatagtaatgacagtgccaataacggcgagtgcgacacctgcttcaaacaagatgacagacgcaaacgccacatcacctaaaatcggcaaaggtagatggacttcttcttgagtaagaaaaggaacaccaaaggcaatcgacgccgtccccgtggccacagagaggaaagcccctgcccctgcaaccattttaaaatcgattggcatgcctccttgcacggtttcgatatcaaatgccaagtacatcagcacaaatgccgaagagaggacgagtcccccgacaaagccgccgccaggttcgtaatgcccggctaaaaataaatgaacgccgtacgttaaaatgatgaatacggccactttcgtcactgtccgtaaaatgacatcatttgccttcaaggtcacgtccccccttactcgccttcagcttgataagcacatacacgccaagaccagctatgagcaacactacgacttcaagcatcgtatcgaatgcacggaagtcgccgagaatggcgttaacaatattctttgcgcctgcaagttcataggcattttcataaaaagcggaaatggagtcaaacaagcgattgctgttgactgacagcgccagaacagtcaccatggctcctgttgccactgcaataagcccgttgagtagctttggcttcgtcttgtgcttttgtttgtcccaatcaggcaggaaataaaaacaaagcaagaacaatgcagctgttaccgtttcgatgacaagctgtgtcagcgctaaatcaggggcacggaaaaagacaaaaaacaatgctactaaataaccaagaacgccgtttaaaagaatgtcagtcattctggatttagcaaataggattgaaatcgctgtaatcgccattacagcggcgagaattccttcataaatactaataggagcatcattcgagacattaaaagacaacgcgcctgtcgttaaggcaaccgtatatacaagccccaatatcacaaggaatatatagagcaaatagtggtacatattccctgtcatatagcggtttgttatttcattcgagcgtctttcaaccgaaatcagcgctccattgtataggcgatcaagcgatagcattgccggaaagagagaatacacaccaacccaacgtggcaacgaccggtatagaactagacctaaaccaacaatccctagcgtcatgagcaattctgtattgatcccgtgccacgccttgatctgatagtcgaatactcctgcatctataaacgcaggcataacggccccgtatgctggtttaagcaaaaattcgcctaatacattcgggaagaagaagaacgcgacaaccaggctcgctaaaataacaggcgagacaagcatgccaaacggtgcttcatgcgctgacttttccagtttttctggctgatgttcaccaaaaaacgttttgaatatgagaatcaaacaatagacaaaggtgagcacgctcgccagccatgcaatgatcggaaatagcagcccccatgtctcaactgagaaaaatggcagctctattatgcgcaaaacagccgtaaaaaacatttctttgcttagaaagccattaaatggcggcaaacctgccatcgaaaagctgccaatcaccgctactgtaaacgtgactggcatgactgtcatcaatccgcctagcttgcgaatgtcccgcgtccctgtttcatggtcgacaatacctacaaccataaacagtgcccctttaaacgtcgaatggtttacgaggtggaacaaagctgcaaaaatcgcgagtgaataataaaaagattgattgtctataacgtcaaaatgcagcgctgccgaaccgagcccgagcaatgtcataatcaatcctaattggctgatcgtcgagtaagcaagaagggcttttaaatcggtttggcgaattgctgtaaatgagccccagaatagcgtcacaattcctacgatactgacaacccaaaaccaaacggcctctccgccaaaaacaggcgtaaaccgggcaactaagtaaatgcccgccttgaccattgtagctgagtggagatacgcactaacaggcgttggcgcctccattgcgtcaggcaaccaaatatgaaacggaaattgggctgatttcgtaaatgcacctaatagaatgagcagcatcgctggcacaaagagggcatggctagcatagtcgcccatcccgccaataatttctcttacgctgaatgtgcctgcaaacgaactaagcattaaaaatcctgcaagcatgccaattccgcccatcaccgtaatcaacatcgatttttgggcgccgtatcgagattggcggcgatggtgccagtaagcaataagcaaaaacgatgaaatgctcgttaattcccaaaatacataaagcactagcaaattatctgaaaacacaacgccgagcatagctcccataaacatgagtaaataaatataaaaatgatgcaatgattcccgttctttcgaaaggtaataaatcgaatagaggatcaccaagcttccaacgcctgtgataagcaacgcaaagattaaacctaacccgtctaaatacgctgtaaaattaatgccaagtgacggcagccaagggattgaggaatagaatgtttctccattagcaacagctggaatataactagccaatatcgcgaaaagggcgactggtacagccagtacaaaccaacccgtatgaatggcagataaccttttatataggaaggggatgaaaagagcgactataaaaggtgttaaaatagcaatgtttacagtgtacaaaacgcgacctcctttttctcaagttaaactgcgtaaatctatgtacgtattcattcctttcgcttatgtccttccaagtgtaccctaaaaaaaccaagccaatcaaagcttgtgcttcctagagagaaagtgtatgatgaaagcaaaatattggaatgtctgctttatgccagctcgaaatcgcgcaacggagtggatgctgcacggaaaagccaattcgcctgctttggacgctaggccttttatatacttttccagagcacgagggaaggccaaaaaagcatgagggttgtttgtaaaaaatgaaccgttggtgatttacttgtcgattaaaagtatatactatttttaaaggcaatgcacacaatacgccttgggccacacaaaaatgtcacaggcagtatgtcggcccaagcaaacgaacgtaattggcattcaataaagaggagaaagaaatttaatcttttttgtagaaacaattgaaattcgtccatcgccgttatataataacaaagttttcaatatgcctcggtggcaatgagctgactgagggcagaagccatattcagacctaaacgtcattcttcattgttggttcgataacataattaactgaggtgattttttatgaaaaaagctaaaggacgcatggatgaaagcatcctcgtatgcgtttattacgggccaaacggcgaacggttaattaaacgcggtgctaaaattgctaacatgcttgactgccctttatatatattaacggttgacccactcccttatgatgagttagatgccgaaaaatcggcctatattgataggtggaaagagctggcggaagaatatgatgttgaagaatttattattcgtgataatgaaaagaaaccggcggtaaaagtaatcgctgaagtggcgagagaacatcatattacgcaaatcattatcggccaaacagctaaaagccgatgggaagaaattacgaaaggttcctttatgaacgtgcttctccgcgagattcctttcgtcgatttccacgtcgtttcctgtgaccgggcgatcaaaggactcgaaggccactttgaaaaaggcgtgcgtgcctatcttgtagaagacgaagaagggtatcgtcttatgttcagccatacgaaagatgctaaatatgaaggcatattctttaaagaaacgggaacggacttcaataacggcattttcaaatttatgcgccataacaaaatgtgccaagtccacattactgatgaccgtgtgacagagccgaccaaaatttatccacaattaaaagaagaagcgttgcgaaaataagattgttgccttgtcgcggcaatcaaaaagccagttgaggacataaactcaactggcttttcgtattacttatataatttaacacgatcttcaagcggcaaaaattctttctctcctggctcttgcacaggtttgccaaaaggcatttgcgcacgaagtttccacgtttctggaacattccattcttttatcaccaattcgtcaacaatcgggttataatgttgcaacgaagcaccaaatccttcgttttctaaaccagtccatacagcaagttgatgcatgcctgaggattgctctgaccaaatcggaaagttttccgcataaagcgggtaagactcttgtagcttcagaattggctcctggtcttcaaaaaacaatacagtaccgtaccctgctttgaatccatccattttctgttgtgtgcctgagaagtctccgtctccgactactgcttttaaagcatctgtcgttaaatcccaaaacttgtcatgttcttttccaagcagaatgatcacgcgtgctgattgggaattaaacgcagacggaacatgttttacagcatgctcgacgacttctttaatgcgttcatctgatgcgacagggtctttgctaattgcgtaataggaacgccgtttctcaattgcttcaaaaaaagtagccattgaaattctctcctttgtatggtttttcttttttagtctatccaatccccaatgaataaaacagtacgcactttaaagtacgttagtataataaaagaaactatagaggctaaaaaggccaggcaaaaagattgtctatatccatttgtttgtcatatagtatataaaaagaaactgttaaaaggagtggaaacgatggaatcctgcgaagtagatacagcgttagaaattctggtcggaaaatggaaacataaaattttatttcagttaatgacacatgacgttatgcggtttaatgaattgaaacgtgctattccgggcataacccaaaaaatgttaacatcacaacttcgagagttagaatctcatgatattgtagagagaaaagtttatccacaaatcccgcccaaagtggaatactccatttctgaatatgggaaaagcttacagcctgttttagacgccatgcacgagtggggaaagaaccatacggaccacctcaacaggacatacgctgaaacaaacgaacaatcttaatcaaagacccccctcgccaaatgaaggcagggggtaaacgtattttagcgcttgctcctaacgggctagttaaccgtgagtcgcagcggcttctccatgtttcggcgtggtgccttcgtatagatgacaagctgcaaaatggccgggctggtattccagcatttgcggttcaatgagcgcgcatcgctccattgctttcgggcaacgtgtccgaaaaacacagccacttggcggcgaaagcgggcttggaatctctccctttagcaaaatttgctcacgcttgtcttctaaatctgggtctggaatcggaatcgctgaaagcaatgcttctgtgtatgggtgaagtggattcttataaagcgcctcgcttgttgtcagctcgactagtttgcccaaatacatcacgccaatgcgatcgcttatatggcggaccatcgataagtcgtgggcaataaacaaaaaggttaatcccttttcacgttggagtttacgtagcaaattgactatttgtgcttggatggagacgtctaaagccgaaatgggctcatcagcaacaataaactctggatcgacggcaagagcccgagcaatgccaattctttgccgttggccgccactaaattcatgtggatagcgattggcatgctcagcgcctaaaccaactgtttgcaacagctcataaaccttttccttacggcggctccctgtatagagctgatggatgtcgattccttcggcaataatgtccattacgacagaacgaggatttaatgaagcgtatggatcttggaaaatcatttgcatgcttcgattcagtgcttttgcttgcttttgtccagttttatggacatcggtgcctttaaacttcaccgacccagacgttcgttcatacaaacgaaggattgtgcggccaagcgttgactttccacagcctgattcgccaacaagtcctagcatttctcctttcttaatggcaaaagaaacgccgtcgaccgctttaagcgtttggtttttgcgtatagcaaaatgtttttttaaatccgtcacttccaaaagcggctcactcactaaatgtccctccaactaggcgcgcttaaaaaacggcgcactgcgcaaagttctttttcatatatagttccagcaaggggtatttgctcgactgttttccctgtttttggagcatgaatcatttctccattgccagcgtacatggctacatggtgaatcgctcctgttccattgtcatgaccaaaatagagcaaatcgccgatagccggcctgcttgtatcaacgatttccccggtcaagacttgattggaggcatccctcggaataagaatgccgctggcacgatggatcgcataaacaaacccggagcagtcaaaaccaaatccactcattcctccccatagatagggaaggccaataaactggcgagcgctttttaacaatgcctcccctgtccgttccctcggcccctcttctatatcagtccgtttaacaatccctgttccaagaggcgtgtcgacatggatgacatactcttcaacttccacgactgctagttctgtaccaaaactaagcgtcagccatttttggtgtttttcagtaaacaacggcgcgaccgtgcttgaaatccggactgttttcatagcaggagggcttttttcctggagctggcaaagggggatccatcctgggtacccttccttatgtttcgtagttggctggtttggcaatagcacttcagcccacttgcctacttcctgtatgatcagcacagcctcgccaaacaaaacctggctttggacgcggttttccgtacaaagtgctaagcgctcgttataggaaagttgttcaagccactcttcatagcaactggttgcacagattattttttcgtcaatcgctcttggcgaatcctttgatgtccaaagtgtcacaactggctcagctgcctgtgcttccttcattgcccttcccccctcacaccagcttcaacgacaaaacgtttgcgctccgtatctaaaacggccatggctccatatggaacagacaatgcaggagagcaatggccaatttgaaaaccgcttatacacggcttgccagatgcagaaaaatattcatccaatacttcttgcagtgtaaacgaatgttggcgctttttcggctcacagccgttaaagttgccgataacaaaacctgcagaatcatcaagctttccggcaagcctaagctggttaagcattcggtcaattcgatagggttcttcctcaatttcttcaataaacaaaagagcgtcttttgtatcgatttcatagggcgttccgatcatgctagcaagcaacgtcaaattcccgccaaccaatttccctgtagccatgccttgtgctaaaacgcgcaacggctgacgtgtttgctcaaacacttgctggcgaggcgccatgatctgtgataatccggctaatgttgccccttccaattcgctattgccaaggtcagaactaagcatgggcccatgaaacgtcactaaccctgtttgctgatggatcgcaacatgcaagcacgtaatgtcgctatacccccaaaatactttcggatgttcggcgattaatttgtaattcaggcggtctacaattcttggtgttccatatcctccgcaagcacaaaacacgccacgcacgtcttcattggcaaacatcgcttccaaatcagccacacgctcggcatccgtgccccctaagtaaccgtggcgtttgcctaccgagggagcaagcaacacctgaagccccatctcttcatacaaagattttgctttttcaatacgggcgagatctggtggacttgccggagcgaccacgccaatgacatcacccttttttaacgcttttggtaagatagcctccacaagccattccccctttgcaaaacgggcatgagggaagagcgccctctcccctcatgccttttaattaatgtcagcccatttcagctcaatatagccaacaggatggcggacaacgcctgtcacggagtcgttttctaagattggctggttataaaagtaaagagggaaaatcggcatttcttccattaacagtgcttctgcctcatggagcaacgcaaaccgccgctcttcctcgccttcctccttagactcggcaatcaaccgatcatactcttcgttctcccaaccagtccggttcatagagctgcctgcgacaaaactttcaaggaagttgactggatcagcgtagtcggcgataaacgaagaccgggacatttgcagttctaaattgcgttgctgatctaggaaaacacttgattcaacgactgccagctcaacggaaacgcctaagttttcttgatacatttgttggagtgtttcagcaatgcgctgatgctcatccactcctgagctatatgaaagcgtgacaggaggcaattctgaatagccttcttcagccatcccttcttcaagcaatgcttttgcttcgtctgggtcatactcaagcaagtcaccgcctgattcacggaagtcaccgccgccaggttcggtaaatccgtaggaaacaaatgcccctgccggttcctggttttggcgaatgacgctatcaactatcgcctggcggtcaactgctttggcaaatgcttggcggattttttgattttggaacggctcttcagtcactaaaaaccggtaaaagtatgtgcctgcttgttctaataggtcaacctctccctctgcaatcagctgttcggccatgtctgccggcggtgcggctgcatgaaggtttccttgttcatacatttggtaggcagtcattgcatcttcaagcatgagccatttgacaccgtcaagagcgacattttccgcatcccaatactggtcgtttctctccatccgcaattccgagttatggtcccaaccagcgaggacaaatggaccgttgcttacatacgtgtctgcttctgtatgccaatcagggttttcttctgctgttgctttatgaactgggaaaaacgatggattggcaatgatgctaaggaaatattgttgcgggctagtcaatacaacctcaagtgttttgtcatcgatagccgtcacggccatatcctcggctgagccttctcctgcattgtattcagcagccccttcaatcaattcagctaaaaaagctgctgaggaagcggtctctggattgacaagttctttccaggcatattcaaagtcttctgctgtcacaggctccccattggaccaattggcatcatcgcggatatggaacgtatacgtcaaaccgtcatcggagatttcccaactctcagctgttgcttcctctggcgtatggtcagaaccaagccgtgtaagcccttccattatgttattcagcggcgcattcgaaactgcttcgaacgcaatttgtggattcaaagagacaggctcattgccattgttcaaaatcaagattttttcctctgctttttcttctgtccctgtttccccctctgttgtttctggtggattttcgtcagttgacgtcccggttgtacaagccgcgagcgtccatacaaagcttgccgctagtggagcataataccatctctttttcatcgtgcttccccctttaagctaactctttaaaaacttgtttggcgcgtggatcttggagccagcatgaaacagcatgcgttcctgttatcttcgtttccgctggcatatgggaacggcaaacatccatggcgtacgcgcagcgtggcgcaaatggacatcctgccggcggtgcaaataaatcaggcggcgtgccgccaattggttcaagctcagcttcactgccgtctaggcggggaactgaatgtaacaatccttttgtataagggtgctgagggttataaaacaattctctgcgattgcttgtttcaacgatttttccggcatacatgacatgcacacggtcagcaagctgagcgacaacgcccaaatcatgggtaattaacatgatcgcgactcctgtctgccgttgaatgtctttaaaaagctttaaaatttgtgcttggatcgtaacatcaagcgccgttgttggttcatcagcaatgagaatgtccggtttgcaaataagcgccatcgcaatcatgagacgctgcctcatcccgccactaaactcatgagggtactgctttagccgttctttcccgttggcaatgcccacgacttcaagcatttccaacgctttgtgattagcctcgcttgcagaaattgacgtatgcttgcggatgccttcagtcaattgtgtgccgactgttaatgatggattgagcgaggtcatcgggtcttggaaaatcatcgaaatttcgttcccttggatacggcgcatttttttagcggacagcttcgtcaaatcttggcctttaaataaaatttctccctgtttgatcgcggcgctcccttttggcaacaggcccatgatgctttgtgctgttacgctcttgccgcagccgctctcgccaacaacagcaagtgtttctcctttttccagactcagattgactcctcggactgcttgaacttcaccgccatatgttttaaacgctatatgcagctgttttaattgcaataaagccaaatgctaccgcctccttgtttttgggtcgagtgcatcttgcaaaccgtcgccaaagacgttaaaggcaaacatggtgagcgagatgaaaaaggcagggaaaaacagacgccaccaatggcctgtcaatatagaggacaaaccgttattggcgagcgatccccaggaagcaaaaggcgcttgaatgccaagccctaaaaaacttaaaaatgcttccgcgaaaatcgctgaggggatggtcaacgtcatttggatgatgatcggccccattgtattcggtaaaaggctctttcgaataatatgcgaagtgctcccgccaaatacttttgaagcaagcacatattcattttgttttaatgacagcacttgaccgcggacaattcgggccattccaacccacccggttacagtcaacgcgataataatcgtaagcaaacctggccccataataaccataagcagtatgacaactagcaagtaaggcaagccgtacaaaatttcaacaatccgcatcatggtcgaatcgacgcgcccacctttgtaaccagagattcctccataaacaatcccaattaggcaatcgatcgcggctgcagcaaggccaacaaatagtgaaattcgggcaccgtaccaagttctggcaaacatatcacggccaagctcgtctgtaccaaaccaatgttcagacgaagggggcatgttgactttcgttaaatcgccggcagtgacgctatgaggagtaatccatgggccgatcaccgccatgacgccaagagcgaccatcgtcgcaagtccaaacatcgccaatttgttttctcgcaagcggacccacgctgaatgccaataagacaaagagggacgaacgactttttcggcactgtcagtctgtaccgcttttttaaataaagcgtcatcaactggctgctggttcgaatcaagaagcgccattagtggccctccttccgatgcagtttaattcttgggtcaagaaaaccgtaaacaatgtcaacaaggaacagcataaccagcagaatggcgctataaaaaatcgttgtacccataatcactggatagtcgcggttattgatcccttcgacaaaataacgaccaatacctggtatggcaaaaatcttttcaatcacaaaactgccagttaaaacgccggcgattagtgtgccaagtatggtcgcaacaggcatgaggccatttcgcaacgcatgtttgacgacaattgtcacaggggatagcccttttgcctgtgccgtccggatataatcttgtgtcagtacatcaaccatcgttgaccttgttaatctagctataatcgccattggcgacgtagcaagggcaaaaacgggcaagatcatatgctgccagctctgccatgtcgcaattggcaaataatctttaaatgagtgtataagtaaagcagccaaaatgaaattaggaactgaaaggccaagcacagcaaaagtcattagcgtataatcaattaggccattgcgctttagcgccgacaggacccctaaaataacgcctgaaacaagggcaatggcaatggcatacactccaagttccaaagaaacaggaaaacctcttgtgattaaatcattgacggatacgcctggttgtgcaatcgaaggcccgaattcaaactgcatgagtgattgcaaatacgagaagtactggtcgatcactggctggtcaagcccaaagtaagcttctaaattggcacgtactgtttcatttgtcgtctgttcactattgagcggcgaacctggcactgcatgcataagcgtgaaggtagccgtaataatgacccataacgtgagtaacattgctaaaaaacgtttgctcacatatttaagcatgtggatcgcctctttctagcaaaacgtcgtttgcatggcaagctcagtcatgacaagcatcgcctggtacgcttccttaacgtcttttgctgcaaatttaacagttgtgcctgtctctaattcagcgccaggcattaacgctgcccattccgcttgcccgtaattcgcaaattcaatatgtaaaataggctgcttgtttgcaatgagcggttccactttgccgcttttcattaaagcttcctttgtttttgtttgcaacaacgctttgctttttgcaggcgttaaacagagagcagacgaacgggattgtgctgtttttactatagcagttgtcacattaggaatgagcgcttccgcttcttttgcggcctggtcatctcctgctacaagcaataccggaacaccgtaatagccggctaaataagcatttaaccccatttccccgatttcatggccatcaagccacatcgaacggacgccaaaaatcatcgtatggctcatgactcctggcatagaagccctggagtggtagcctataaagaaagcgccgtcgaacgaatcgtcgagcccttgtaccattgaatacggtttaacctcgccagaaaccaattcaatttctgcaagaagccgctccacaagcaaattattcattttcccatgtgagtcattgacgacaaatcgtttgcaaccaaaggcaaacgcagcttctgctacgtggtttacctcgtctgtcatcaactgttggccccgttcataaaaccgttcgccgggcgttacaaactggcggtcaacaagccctgtgatcccttccatgtcaactgacgaataaatgttcatttatttccctctcttcagccttatctgtccagtatgatagttagtattctaagaaaaagatcgttttcctgctcttcttgcagaaaataaaaaagaatcgtgtcaacttttctggcaaagccatgactttagcacattagacttacgctgaatgaactaaaaaacttcttattacgacaataaaagtgctgatttattttactccttgtgtataatatatggacatagcgttatttctcctagatatcggctagtgctgcattgcccgctttggggctcaatttttgttccatttgcaatttttcaatgaaacaggtggacttatgcgttcgaaaaaatggcttactgtcgtcttcattggcgtggcgactgctctaatgggtgagctccgtttcgccccatttggttgggaattccggtttggcatgggtagtagcacattcttttttctgctccttgcttttaggcaagcccccccttttctaacggggattttgacaggagcggttgtcgtactgtttcgggtattaacaagtaccttatttttagaagatccctactcttttgtagaagttctatttgtccatctttcagctatgttttattactgggctttcggcttaggaatcacccttttaccgaccaagcttgtccaaaagaacatgctctggtttggattatttgttgtcgttattgatattgcctctaatttaaccgagctctttgcccgttcggtcttacaagacattacgactctgtcgtggacagattggttggcattattggtggttaccgttattcgggtttattttgtccttggcgtttacgccagcatcgcccagcataaacagcagacgatcttaaaagaacaaaaaaaacgctatgaaacgttattaaacgtaagtgcaagccttttcggcgaaagctattacttaagcaaagtgattgaaacagtggaaaacatgacgaacagagcattctatctctatcggaaactaaaacaagaacagtcagcgtaccaccaagaagcattgcaaatttcacaggagattcacgaaataaaaaaagacgcacagcgcatccaagcaggattagcgaaactaaacaaccatgaccacacatttgagcagttaaacctcaaacaattaggcgattttgccatcaaaggaaatgaaagctatagcttttttctaaacaaacgtattcgttttcgccaagaaataacatctacttatttaacaaataaacatgtcgaacttttaagttgcttaaataacttgttagcaaatgcaatcgaatctattgacaaggaaggcacgattttactttctatttatgaaaaaaatgagatgacttattttgaggtgactgacaatggcgctggcattgcagaagaagatatgcatcatttatgcgaaccgggttttacaaccaagtatcgtgaggacggaagtccctcaaccggaatcggactgactcacgtgcagcatattgtcactgacttaggtggattcctgcaatttgagcgcagccatgtcacaaaagtttgtctagttattccaacgaagcgattggagggaaatcaacaatgataacgttcgcaattattgacgatgagcctggttgtcggcgtatgttagcgtccattattaagaaaaccggacttggagagattgttttaagtgatgaagggaacgctgcttcgattcatgccattattgctcgccaaccggatatcgtcttaatcgatctgctcatgccgaaaatcgatggtcttgatatgattgagcagttgaaaactgctggttatcgtgggcgttttgttatgatctcgcaaaatgacaataaagaattagtaggtgaagcctatcagctcggagtggagtttttcattcataaaccaatccatgcgatcgaagtagagtctgttttatcctatgtaaaacgccagcttcaaccttcccttccagaaatgcaactcgcattagctcatgtgagccatgcgactcatccgcatgttgccctgcaacgagcagcgcggcggacccttgcagagctagggatttcaaacgaagcaggcgccaaagactttatccatgcgatggattatttggccgagacagggagcgagcccctttcattgcgtactttatataaaaaaatggccttagcccgcttttccaaacctatcgatcaagaaaaagaggcaaaggccattgaacaacggatgcgccgagcagtaggaaaagcactgacaaacattgcttcccttggtctaactgattacgctcatccaaaatttgagtattatgcgccgcttttcttcgattttcgtgaagtgaggcagcggatgaaagaaatcgatttagacatggctcatagtgtcgtacgcattcatattaaaaaatttttatttgcactttttgatgaagcaaacgaaagtagaaaaggtgcttaaacgtgcttcgcttcaagtttctttgcaattttggacaatgcaaaattgacgacaaagtacatgaccgcgacaaagaatagaatcgcgaagaccgaattggagttatgggcacttagaatgcgtgcatggtgcatgacttctggcaatgtaataatgaccgcaagcgaagtatcctttaaaagggcaatgaattgagaaaccgtcggtggcatcatttttcgtgctgcctgaggaatcaaaatcgcccgcaacgtctgtgtgtacgtcaatccagatgaacgcgcggcctcaatttgccctttcggaatcgaatttaaaccactgcggataatttcagaaatcatcgcaccttcaaatacggtcaaagcgacaatagctgctacaaacgggcttacttgaaaccctagttccggtagcaaaacaaaatgggtaaaaaataaaatcaacagcaaaggcaaacagcggataatatcaacggccgcgcctaatactctcgaaaaaaccggaatctttgcatagcgaagaatgccgagtacaatgccgactacataactgcaaatgatggcgattaatgccaataataatgtaacttgaaatccttcccataaataaaggaggttggatggcgtatatgccgatagaaagtccatttaggcgccccctttagcaaggcgtttctcataatagccgattccccagctaagcggaatcgttaaaagtaaataaaataacgcaacaatgccatatacggcatacggactaaacgtcatgctgttaatgatatcgccttggtacattaagtcagcccctcccactactgcaagaatcgaggagtttttcaccaagttcaatgtttggttcccaagtgggggaatgactgttttgatcgcttgcggcaaaatgacgaagcgcaatgcttgtgtataagttaaacctgaggagcgcgccgcctccatctggccggttgggattgcctgaatgcctgctcgtatagcttcagcaataaaggcgcttgtataaatcaataaacctagcgtccctgcttcaaagccgcctaggcgaaatccaagccaaaaaataaagacagtgagcaacagcgggatgttacggaaaaactcaacgtaagcagttcctagccaattaagtacacggatcgtggaaatgcgcatgactgcaattagcgtgccgacgacgaagctgcctacaagggcataggtgcttgcttttaacgtctgcaaaaagccagacaaaaacgcatcccaatagtcaattaagattgtaatcatcgtttcgccccctttttaaaaagggcaaaagcgcaagtttgcgctttcccctaagcagtcttattctggagactcgccgatccatttttcataaatttcatcataccggccagaagcttttaagtctgcaagaatttcattgattttttccgtgaattcgtcgtcgcctttgcggacagcaatcccatatggctcgtcggtaaatgtaccgccaacgacttcataatcgctattttcctcagccataccataaagaatggagttatccgtagttagcgcatctccttgaccggactgaagagccaagaatgcctcttggtaattttcaagctcaatcacttcggcatcaggcgcttgttctagcaagttttggcctgaagttgcgcccttaactgcaagcacttttgttccagccccgatatcgtcaattccttgaatgtcgctgcctttttccaccaataacgactgtcctgcttcaaaatacacatcagagaagttgacttcctttttgcgttcttccgtaatggtcatcgtcgcaataatggcatcgatttgcccattgtctaatagtggaattcgtgttttagacgtcacttcttttaattcgattttgttttcatcgcctagcagctcttttgcaatttccttggcaatatcgatgtcaaacccttccacttcgccagtcccaggatcctttaagccaaacaaccttgtgtcaaatttgactccgaccacaaatttgtccgcttcctcaatttttgcaagcgtgctttcttcattgctattttctgtgcttccgtctaccgtttcatcgccaccaccgcatgcagagagagccaacacagccgctcctgcaagcaatccattcatccattttttcattactttttccccctttaaagtatgtgatgaccacagcaaatacgccttttaaagcctaatgaagcaaacggcttaagaaatgctgtgacctttcttctctcgggttttcaaagaaatcgataggcctcgcctcttctacaatttggccttcatccataaatatcactcggtcagctacttctttagcaaatcccatttcgtgggtgacgcataccatcgtcatcccttctttcgctaacgttttcattacgtctagcacttcgcctatcatttctgggtcaagtgccgatgtaggctcgtcaaaaagcataattttcggcttcatcgccaaccctctggcaatcgccactcgttgttgttgtccgcctgaaagctgggatggataagattttgctttttcgggtatgcctactttcgttaagtactgcattgccgtttcttccgcttcttctttagaaactttcaatacttggcgtggggctaatgtaatattgtccaatacattcatatggggatataaattaaagtgttgaaaaaccatgctaatgtcacggcgcaatttattgatatttacttttttatcatgtaaagcaaaatcattgactaacagtttcccatcagtgatggtttcaagcctgttaatgcagcgaagcattgttgattttccagacccggatggcccaagtacaacgaccacttctccacggtcaattgtcgttgttatatttttcagaacatggaaatcgccataatgtttatttaccgactcaaatgtgatcattgctgtcccccctctcgattttgtccattcttgggcttatacgaatggtaaaggcctgcctataaaaacctacaaaaacttatagaaacttatttattcgccctgcgaaacaaaaataaggtaaactaaaaaaaaagtgaattggggagagacaattgaatacgcacagaggagatacatttggcattgtcgcggcttctagttcttatttcatttggggattgttgccgctctattgggcattgctaaaacatttaccatcactagatattttaatgtaccggatcgcgtttgcttttgttttcatcgctatgctgctcttgttttcgaagcaaaaagcccattatcgtacagagttgaaatgggtatttacgaacggacgcgtttttatgagcatcttcgcagcgtctattttaataagtttaaactggtttattttcatctttgccgtcagcggcgaaaaagtggttgatgcaagccttggctattacatcaacccccttttaaatgttgtccttgccactttgttcctaaaagaaaaactgagcaaagcggaagtcgcagcagttgcctcagcgacaataggcgtattgctgttaattatcattgatggccacattccgtgggcctctttcggcatggcgctcactttttgcttgtatggattcattaaacgtgctgctccattaagtgccacagggggcttattcattgaaacgctccttgttgtccctgttgcgctttgctatttcgcttttttcacagcctatccactaactagctttacgcctctgatgatcgcccttctttttggtgcaggggtggtgacggcagtgccgttgcttcttttttcttatggggcaaagcggatttccttttcattgattggttttctacagtatgtcgcgccaacattaatgctgttgctaggaatctttgtatttggcgagcccttttccattgttcagtttttcgcgtttttcttcatttgggttggcttagttgtctttacttcttcacggctccttggccatcgtcagcaaagaataaacgctaaaacatgaatgatttctgcaaatcggttatactgttggagacattgtacgagaggagtgtttggtttggcgatttaccgaggatacattggcacttattccaaaggagatagcaaaggtgtttatacgtttacactagatacgaatacaaaggaaataaccgatcttaagctagcgactgagttgaaagatgcaacttatgtgacgatctccgataacaatcaattcctttatgcagttatgaaagaaggcgacgctggcggcattcaatccttttccatcaatgcgcaaaccggggccctcgaaccgatcaataaggaaataacagcagatggtggaccttgccatattagtgtagacaaagcaggaaaacgggcgttgtccgccaactaccatagcggtatgattcatgcttttgccttgaacaacgatggctcaatcgcaaaaacagtagcaagtgttcaacataaaggcagcggcccaaatgcagagaggcaagaaaaagcccatgcccattttgccggttttacgcctgatgaacgatacattgtagcggtcgatctaggtacagacgaagtcgtgttgtatacacttgatggcgaaaacgtggcaaaacattttacgttcaacgccacgcccggctctgggccccgtcatattgctttccatccgacggaaccatatgcctatattatgactgagttatccaatgaagtcattgtgtgtgctttcgatgcgattcctggaacattaaaggaaattcaagtcgtgccaactttgcctgaaggctatgaagatcttagccaaggcagtgcgatccatgtttcccgcgacggcaagtttgtttatgttggcaatcgcgggcacaattcaattacaagcttccgtgttaatgaacattctggcgaactgagcctagtcgaatttgtttcgactgaaggcaattggccgcgggactttcgcctcgatccaaccgagtccattgtcgttgcttctaaccaagaatcaggggatttaaccgtctactcccgaaacaaagatacaggcaaactaagccttcataaagccaatatttctgtgccatatcctgtttgtgtagcatttttaagcacgccgctttaaacgcagccaaataaaaagaacgcttgccccacatgtggtcaagcgttctttttgtttaaggcaactcagctaaaacttcttctgcttgcttataaggatagtttagatcacgtgcaactgcttcatacgtaataaagccattcgctacatttaagcctttggcaagtgctaaattcgtccgtaatgcctctttagcgcctttattggcaatttgtacagcgaaaggaatggtgacgtttgtcaacgcaattgtcgatgtccgcggaaccgctcctggcatattagcgacagcataatggatgacatcatacttcgtataagtcggggcatcatgtgttgttactttatcagctgtttcaacaatgccaccttggtctacagccacgtcgacaacgacactccctgcccccattttttgaatcatttctgccgttacgagtttaggcgctcttgctcctggaatgagcacggcgccaataacaagatcggcctcggccacagcactggcaatatttaaagggttcgacatgatcgtctgaatgtcatttccaaattgatcgtccagttggcgcagcctttctgcacttacatcaagcagagtgacatcagcgccaaggccaacagccatttttgccgcgtttgtgccaacaacgccgccgccaatgatcgttactttgccccgtttaaccccaggcacaccggagaggaggattcccttccctcctcgcgtcttctccaaaaactgggcgcccacttgcgttgccatccttccagccacttcactcatcggcgttaacaatggcaatgtccggtttatctctaccgtctcataagcaatcgccgtcacgcctgagtcgactagtgcctttgttaactcaggttctgccgccaaatgcaagtacgtaaacaaaattaaccctttgcggaaataccgatactcttcagaaagcggctctttgactttaatgatcatgtctgctgccgcccacacatctttcgcgtttttttcaatgattgcgcctgccttctcatactcctcatctgtaaagccgctgccaatacctgcggctgcctccactacgatacggtggccgctgccaacaagtgcatccactccagctggcgtaatcgctacccgattttcatagcttttaatctctttcggtattccgataatcatatgccaagacctccctcgttaacgtttattttcttagtatacccgagttacggtctttttttctttggggcatccaccctaaaatttcctatgccatttgtggaattcaccgaaagttgcgcttttttgcgctgtaaatctaaatataagccgattcgttcagctgggttacgcaaatgcaagcccgtcaattcggcaattcgctttaatcggtattggagagaattaggatgaacatgaagcgctttcgctgcggcggtaaggtgcccgtctttttcgatatacatggccaatgtttccaacagacttgtttgattttctgcatcatattcacgcaactgctcaattgctggatggtcaccagcgatcatcgctgtgtcttcataaggttgtatatatttgtacgcccctgcttcataatagaacaagcaatccgcgagctcgctgccaaacctctttttcaattccaacaatgctttcgcctgttcataagcccgggcgcatccatcaacggcaaacgaaggattccccgcggctatgtggacaccgtctggcagtttctcagcaaaggcgccaacttgtttccttaagtcttttccataaataaaggcaataaaaaattcaccatcaaacataaaaagcacagcgttgctgctttcaaatagtgcttgtacagtctccatatgttcaagctggtttgccaaatcgattaaaaggatgctgctttgccgctcctcctgccgcacttcttctggtatgtcgcccagttcgtgggtattcgtcaatagtttccaaagtcgctcctcatttgaagcttccccacgtttatatcgattcgctttttgcataagccgtgctgcttttcgagccgcctttttcaaccattgctgttcatatgccgtaagggttcgattggtttccgacacccaaatataaccaagcacacgaccttcctggtcccgaacggataaagcaactcttggcccaagtcccatgtcaggaatctcagcaattgaaatcggttcagacgattgatttaacgaagccataatcccgtctttccaaaaacggtgaattaacggcgctggcactttacggccgataatggtggatactcgtgcttggtctgttccttctccatgctctgaataggccagtaaatgatggtgactgttttctactgtaacaggacatttcagcaagtcgcctaattcttccacaaattgatcaagggtggaaaacgaatggcgcaaaaattgatcgtatgcaaaagccaacatgatcaccactttttctcattcaatcgctcatttgcgggagcgattgttttttactagtatagcaactggaacatttttctgcctagcatctctccacaaaaaaactcgctgacgtgggcgctaacagcaccgaccccgtctcgcgagtctatttcatttattggcttgggtggcctgtctctactggataaccgctgcgtgaagaccaatcgctccaacttcctgcatatagtgtgacctgtttaaagcctgcccgctttaatgcaagtacatttggacatgcggaaatgcctgagccgcagtagacaatcacttcccgatcacgcgggagagcggcaaaatgctgcacgagttcctcagtagtcttccagtttccgtcctggccaagcacgccgccccacggaaaattgagtgcgcctggaatatgcccggcttttgggtcaagtggttcctgttccccttgataacgttctctagagcgagagtcaaccacaacagcgcttcccaacttatttttcacttgttcggcggtaactagccaatcttccttcacatgcggatcaaatcgcgcctcatctgggggcttcacctcatccgtcgtcgggtagccactgttcttccaagcctgaatcccaccgtcaagaatagcggcgttgttgttgcctagaaattcaagcatccaccatgctcgtgctgccgctattccaccattttggtcatcgtaaataacgactttgctgtcttttgatatgccttttttggcaaacatctgggccatgtcctctggagatggcagcggatggcgccctgccccttggatgcgtttgtccgccatttcttcggccatatcgataaatagagcgcctggcaaatgttctgcatgataagcctgttttcccttcttttcatcaaataaatcaaaacgagcatcaaggacgatgacttcaccaagcctgtcataaagccatttaggcgttacaatcatgtgcactcctcccttttctatccatcataccaaagaacaatcccaaaatgaaaaatgtgaatgtaaatagcagaatgccgttctggggaaatggactattgcactcttgttttctaagccgtacaatgaagtgtacatttttttgggggtggttcctttggagaaagaacagcagttaaagcgtacgcttacgctggtaccgctgctcgtcattggccttgcctatatggacccgctagtcgtctttgatacgtatggcgtggtcgcgcaactcactcaaggccatgtagcaacatcatacttgtttacaatcgcagcactacttttaaccgcttatagctatggacgaatggtccaagcctttccaaaagcgggctcagcgtatacgtatgcgcaacaaagcatccatccaaatgttggttttgccgctggttggtctttgcttcttgattacttgtttttgccaatggtcaattttgcaattggcatggcttatttaaacgccgcttttccagaagtgcccgcgtttatttgggtcgttattttagcagcggcgattacgaccgtcaatattctcggcatacagttaactgcaaatataactgggttattcgtcgcgttccaagttctagttgctgccgtatttgttgtttttatgattcgtggtttgatgaatggcttaggcactggcgagctattatcgcctgtgcccttttttagtgacacattcgcattccaaaccgcttttacaggtgcgtccattctttgcttttcctttttagggtttgatgcgatctcgactttgtcagaggaaacgaagaatccgaaaaaaacagtcccactggcgattgtactagttgtcttaatcgggggcgccttgtttgtagccgtttcttacttgctgcagcttgtttatcctaattatgatgcgttcatttctgccgaagcggcatctttggaaatcgcccagtacgtcgggggcgcatttatgcacgccttcttccttgctggaacaatggttgctgtggtctcatcctccatgtcttcccatgcaagtgcttcaaggctgctattcgcgatgggacgcgacaatacattgcctaagcgcttttttggctatgttcatccgcgttttaaaacgccaacgtttaacattgtcctaattggcctcctttctttaaccgccatttttggcgaattggaaatcatatactcattcattagttttggagcgcttattggttttattagcgtaaatgcatcggtcgtgttccattactatattcgcgaaaaacgccgttcccttaaaggaacagtggcaaatttgctgttgccagcactaggagcggccttttgcatttggttgctttattccattgatagacatgcgttaacgattggcgttatctggaccatccttgggcttatttattttcttgtacgtcgaaaaaacagtccacattttacagcagacgctgccaaccgccataaggaatgaacgggggaatttcccctagcctgctgagttctataaggcaattgcctcgcttgcctttctgccagtctggtttgtaccataaacaaaaagagctagcgtctggaaggggggcattttgtgcggccatttttacgattgctgctgtttttggtgatctgcgtcggccttgtgttcattgcaggatttatctctagaacaggttggttcaacggtttggtccaaccttctcttacagcgataaacaatacagaagtcgaaatagaagagattgtcccagcggatgggcttcacccagtggtagctgactatacggaaaaattgattgaagaagcagaagcaatcggtatctcgatcctcattacagacggttaccgcacccctgaagaacaagaccgtctctatcaaaaaggacgcgaccaacatgggcgtattgtcacaaatgcaaaaggcggtcagtcttaccacaattttggccttgctattgactttgcccttttagatgagggcggcgaacctttatgggacatcgcttatgacggcaacgaaaacggcgaacccgattggtttgaagtcgcagaattggcgaaagaacttggtttcgaatggggaggagattgggcaaatttcaccgattatccacacttgcaaatgacattcggctattcaatcgaagaattgcaacatgcccacactgagtttgaaaaaagcgagcttccttaacgtaaagggatctcgctttttttgaacaaactctttgttaggccgattattttcactcaatttgcaggaatttaaatattattggcgaataaagtatatataaaattaaacattttgcttcttataaataggttaacgatacttatacaaagtgggttgatgaaacgtggagttaggcaaaacaatcaaatactaccgaattaagcataatatgacacaggcagaactcgctgatggtatttgctccattccacaccttagcaaaattgaaaacaacatctataaggccaaccatgctacagcttcccttttgcttgaccggcttggcgtcaatatagaagatgaatatgcccaacacaacgagattaagcagtcgctggaagcctttattgaagcgatacaatttgtggatgtacaggaagcaaaacggattcaaaaattattagtcgagaaggaatttatcattgcccgaacggattacattaatacgtaccatttatacatgatgcgctaccatttgatgaacggagcaaaccaccttgcccaagagcagcgagccatcttagataaaaaccgcacgaatttgtccgcgatcgaagaactgtcttatcgtctgttcaacggcatcctcctagtaaaccgtaaccgcttaaaggaagcaaaagaaattttgcttgacttgcaaagtgaagactattcttccaagtacatttttgtccgtgaagtcgcttttgtgctagcacagtgttttacacagctaaatgagccagaaaaagccatcatttatgcaaaagaggcgcttcaaatttttaagcaagaggacaattacattcgcgcttttcacacgcaaatgttactaggggtcaattatacacaaatgaatatgacagaggaatcccttcgcctctataaaatccttttgcgaaacacacgcttgtttagccgcgacacgctttattaccaagccatgtacaattacggcgtcttgcttaaaaaaatcggcaactatgaacaaagccatgaatgttttacaaaatgcagtgcttactacgataaagacagccaaaattacgtattcagccttctcgcagacatagaagttctcttccaattgaaaacggacaaaaaacaaattgaatcaaaattaaatgaaattattgaaattagtgcaaaacgtggatacaaacgttctgagcttcaagcccgctactatgcgcaccgcttaaaagccgacgatgcgatgtacaactttatcgaacaggaactgctccctcatctcgataagcttgataataaagaagagccagtccactatgcaattgagctggcacaatggtatcaaaaaaacggagagtacgaaaaagcaaacgaatacttaaataaatacgccatgaaagtcaaaagacgtgaattttccatcgtgtagcggcaaatcctgcgagcgtaaagagcttcaatagccctttacgctcgctttttgaaatcggcgatctatgctctttttcgattcatacacactaaaaaacgctgtgtgcttaaagcacacagcgttattattattgattagcgtgttgccgcttctgcattgacaagcccgcttccatacaagttcgtgtttcctaaacccgttgccgtattctttagatgattgcggatttgtacattggaccaagatggattcttttgtttaacaagggctgctacacctgcaacatgaggagtagccatcgatgtaccgtttaagctggcatatgttgaacctgggtatgtgctctgcacattgacacctggcgcgacaatgtcaagcccagctccatactgtgaaaagctagcgcggttgttgttttggtcagtggccccgactgccattgcgttcgcataacgggccggatagctgattgagcctgcacctgaattaccagatgctgctacgacaagaacgcctctagaagtagcgctattaacagcttgctcaagtgttgcactcggcgacgggcttcctaaactcaaattcgcaacgtgcatgccattgttccctgcccattccaatccttgggcaatcgagctgaccgaacctgaaccgctcgcgcctaatacttttacagcgtatagttccgcgctcggtgctacgcccagaacgccaatcgaattgtttaaagcagcaatcgtccctgccacatgcgtgccatgtccatttccatcttgagtggatggttctcctggcacaaagctagcaccaccgcgaatatttaagtctggatgggtggaaatacccgtatcgaggacagcaacttttacaccagaacctgtcaatccacggttatgggcagctggggcttgtacacggctaattccccatggcactgattgcgccattgtcgttacttctgcatcctcttcaatatacgaaatcgttggatcgagctcaagcgcgtccacatcttctggacttaactcaacagataaaacaggaatcgtttcaaactcatgaagcaattcaatttcgacttcctcttcctcagagagaatcgcgacatcgtcatttgcctctatttgctctacaaactcactaactgcttcctgctcattaaagccaattaaatatttttcttttgcttcctcagcagccgatgcgatcgatgaactaaaagcaacagaaatgagtagtgcggtgcttgcgacaattttccccaacggtttcttcattcggttccctcctcacttttatcccaactcgtccaagctggtagtttaaacgtatcaaagttagaaagatttgcctattgggaaacaattattaacattaagttaacagaattttcccactttgttttttgattaaaacggtttcaagtggggaaagctaccaataaaaggaggttgatgggtttggaatctgtccacaaaccagccagtacagaacgaaaaagactgcgcttcaatacgcggctttctaaacatattctcacttacagcgactggtacgactcggcgacaattgaacgtgcgaaaacggatttaaaaaacgcgtaacagccagatttgtctttgtcataaaacaacgaaacaagtgttcatctgtctacgccaaaaagccatttgaacgagaagcattcaaatggcttttttcattattgttcttttgacacacagtagctttcaacccgcttcaagtctcgttcatgcaaatcggcaacgatatgccagccgtcttcttcagcacgttgtgtgtgaacatgggcatggttgtttaaataagcagccgcctccccgtcacgataaggaacgatgaacagatgtttttccaaatcttgaaaaacatagcttgctattttctgtgctaataaatcaagcccttgtttagtcttagctgatataaacagctcatcgccatgcgcttgaggaaatgcctctttcaatcgatccattttgttataaacataaatcatcgggcgatcaatttccatcgcctggagtgtttcatttgtcgtctttgccatttcgcgatggcgttcatttgaataatcgacgacatggaggagcaaatcggcttcccgtgcttcttccaatgttgagcggaatgctttaacgaggtgtgttggcaatttagaaacaaagccaaccgtatccgccaataaaacagaatggtttttgtcaagttccactttacgcacagacgtatcgagagtggcaaacaacatatctttttcaaacactcgcttttcctcggcattgtccagcatcgcattcatcagcgatgatttccctgcatttgtatagccaactaaggcaacgaccggcagcgcttgttttttccggcgtttgcgctgtaactcgcgtcgtttgacaatttcttcgagatctttttccaacgcatgaatacgtgcttcaattttacggcggtcgagctccaactttgtttccccggcgccgcggttggccaagccagtgccgctaccgccttgcctgcttaatgaagcgcgcatgccgacgagccgtggcagcaaatagcggagccgcgccatttctacttgaagttgagcttctttcgtcttcgccctttctccaaaaatatctaaaatcaacatggtccgatcatatacggttacttccagcaatttctcaagattgcggatttgtgaaggcgatagctcatcattaaacacaacgagcgtagccccaagggattcacacatcatggaaagttcagacgctttgccagcaccaatatacgtcgcttgatttggtacaggcagcttttgcgtgagctgtcccgcaacctgtaaatcaagagcatcggccaaattgtttaactcttccatcgaatagtggaaatctgtgtctttttgcaactccacacccacaataattgttggttgtgtcgtttgtctcaattgttcatgcatataataagtcctccagttgttatgtctattttgattttactaggcataacaaaatacacacgcctaaaaagcctgtgtgggcaaacgagggtatttaatttaaggttcggccttcattacttagacgcacctttcccgtttacactggtacacagtagacagtattcagttagcggccttggcaatcgtctttgtaatgatcatgataaaaacctcccttaagataacacatgtatcgtaccagactgattgccaaaacgcaacggcgcggcacagcttcacacaggccaaagccgctttttttgtttttgtaaatgctcaagcataagatgattcacaatttcaggatgctcatggtggagccaatgggtagctccatctactaacacggcatcgccattgctacaccttttcaaactggcttgtgcgagtgcttttcttaaaaacaggtcattggctccccaaatgatccttgtcggcacagagactggcagatcaatctcggtcttcctgtctaccccttggaaacggatggcacgataccaattaagcattcctttcagcgctcctggctgccgccaagccagtttatagtgacgcaattccgcctttgtaaaagcccgctcattggctgttttcgtcattccagcttccaagtaggcaaaatccctggcggcaagcagcttttctggggcatggggcacttggaaaaacagcatatatgcgctgcggaacagctgcaaagggtgcttctttaaagcaacacgcatatcggctggatggggaatattaatggcgacaagctttttcacaacttctggctttgaggcagctagatgccaagcaactgctcctccccaatcatgaccgattaaataagcctgtttccgcccaaacgctttaataaacgccacacagtcatcacgaaggacatcgagcgtgtaagctttaatgtctttaggcttatcagactcgttatagccacgttggtctggcacaatgacgcggtatcctgctcttgccaatgcattgatttgatggcgaaatccgtaccaaaactcaggaaaaccatgcagcaaaaggaccagttctccatcttcttgtccagcggacacgatgtgaaacgtgtggcctcctgtttcgacgatgtgatgtttgtatttttccaacctgaatcacacctttctcttatagttcatgtttacccaagagcaggcttattcatgccctgtccattctattttttaaaaaggcttgacgtttctattaatcttcacgtatactatcgttaattgcataacattccttcaaaggggagtagctgcaagttattgacataacttgaaccaaagtcgtcattacgtggattttccaccggctttgttgttggcatgatacataaatgtctagcaagacctttgcctcgtttttaaaaccaaggcagaggtcttttttgtgtattttttcctctctttggtgaaaacgagctggagtggacattaactaaagagaggcgagtggagcgatggatgtatcattacttttagagtacagctgggtgcttgttgtgcttattgcattggaaggtgtattggcggctgataatgcgctagttctagcgattatggtcaaacatttgcctgagacagaacgtaaaaaagcgctcttttacggtttggctggcgcgtttgtttttcggttaggttcgttgtttatcatttcttttcttgtcgacatttggcaagttcaagcgattggtgccgcatacctattattcattgcgctaaaccatttataccgaaagcatattgtcaagaaaagcgaggaaaaggccggcattgcaaaagctaaaaaaggaagcggcttctggacgactgtgttaaaagtcgaagtcgccgacatcgcctttgctgttgactcgattttagctgccgttgccttggccaccgctttaacgccaactaacctcggcacggtcggcagtatggacatcggccaatttattgtcgtctttcttggcggtttcatcggcctcttaatcatgcgctttgcagctacaaaatttgttgcactgctcgaaaaacggcctggccttgaaacggccgcatttattattgttggctgggttggcgtcaagttgacggtgcaagtgcttgcccatgatgcgattgcatggatcccacacgaattcccacactcaacgggctggaagctctttttctacggcgttttagttcttattgtcattgccggatggttcttatcaagcaaaccacaagatggcgaacaagaagcgcagtcagaaaaacgagctgaacgaaaaatcgaaggataagaaaaaacaaagctcagcttccgctgagctttgtcttctattccaacgacagcctcggctggccatcattacgtctatgtttggcgtaagcctgaaagtaccttcttctccattattgcagtttaatatgcaaatcgcctgttttcgcccagccaatccgtttgattaactcatataacgccaatgaaatgatccctggcaaaatgatgcctgtgcctataaaaatgaacaagcctgttattccttgtgtggaaaaaatcgtaataggcgcaatcaaagaattcaagcctaaaccggcaagctcatacgaaacttggaactgaaaggctagtgaagcaatcggagcgcaaataattgctgcggcaaacggaggcaaacagaggcgcgggtttttaattaaattgggaaactgtacttttggcgtgacaagcccttgggcaagtaacgccccagcatcgttttgtttccaagacataagggtgaaaccgacaaactgagctgtgcaaccaattaatgctgcaccacttgagatcgggtccatttgcaaggcaatcgcaagtgcagccgatgaagctggtgtcataagcaaaatgctccatgtgagagcgatggccattggagcgataataggcgatccttgtacagacgtagccaattgcgcgcttatccattctagcatcggtgtcgtaacagctgccataacaagtcctacaagcccgccaacaaaaataccggaaaaaggaattgccatcatatccagtttcgtctttccagttattcgtttgccgacataagtcgcagcgactgctgcaataacagcgctcacaggttgtcctggtgcgagaactggcagcccttcgacaaaactaatcgcattgccgcccaccgtactcgaagccatagctgcataaatgacgagcgtgtttcctcctagctggtaagcgatcccggcgccaattgctggagcgagtagaattttagtaatggagccaattgtgacaaacgcactccaaccaaaaatattgccgaaagattcaaacaaaagtccaatacctaacgtaacaagcactgcattggcgacccctgcagatgctttatacatccgatcaattacgtatgatttcatgctgtctcccatccttacaatatttcatttatctgtctatttttagtctccgaagcatcataacaccttctagcgtgccttgcaaatgttttttgccagtgggcaacgtaccgttaacagctattcattgcactttgtctgaagatatggttcactttaagaagaaccactaggggagccatctggctgagaaaagcgctgctttgaccctttgaacctgatctggcttgtaccagcgtagggaagtggagaacaattgcttattcatgtaaagcaactctcctttctttgcgtcaggcatccctttgtggaaaaaaaggaggagacgatttttatgagttttactgccgaacttcgcaaaaccgccgacccgatttacaaagccatatttagccatccgtttgtacaaggtattggcaaaggctcgttgcccgcagattcccttattcactacgtcaaacaagattttgaatacttaaatacgtttatgcaaatatacggcattgctattagccggtgcgaaaaccgcgaagacatggcgatgttcgcggaacaaattggctttattttgcacagtgaaacacaccctcaccataatttttgcaaggtggcaggcgtccgctatgaagatttgcaatatgagcctctcgccccaactgcccaccactatacacgccacatgcttgatgtcgcccaccgtggttctctcgccgaaatattggctgtgcttctgccttgtccgtggacataccaagcgatcggcgactatttgtacgaaacgttccagccaaaagcgaaccatccatttttcgactggatttccttttaccgctcaaacggagaaatgggggtaacgaaacaattttgtaaacgcctcgacgagcttgcggcacatgctaccgaacaagaaaaagaacggatgcaagaccattttttaaaaagctgtcaactagagtatagtttttgggaaatggcttatgtaaaagaaaaatggccggttgcttattaacagtgctccggcttatcgttcaaatatgaggaggttcctatgccaaagcgttgtagttgggtaagtaacagccccctctacgagcactaccatgatagcgaatgggggcgccctacttatgacgaccaacagctatttgaaatgcttatgttagagcttatgcaatcaggattaagctggctaactgtcttaaaaaaacgagatgcgctccgaacagcattcgctagctttaactgggagtcattggcccgttttacagaagaagatgtggcgcgcttaaaagaaatgaaagcgatcattcgccatgaaggaaaaatccgtgccattcttacaaatgcggctgtagctcgtaaacttgcaaacgagcatggctcctttgcccgttttatctggtcctttgctccaaataaacaggacaacctttccgaacaagctatagcgctaagcaaagcgttaaaatctgctggtatggcctttgttgggccaaccacttgccagtcttttatggaagctgctggcttagtcaacagccatgaacaaggctgctacctttatcaaccagcaaaataggaatttctgttttagtagacaacaaaaaataggttgtcggcaaagtcgctaaccgcaatcagactgatagaaaacgcttgtcagacgaggagtgcagccgagggaagatgcgaatagaacgggggttcatgagcatatgagtgaggcaaacgacgaagtatgcgagcgtttgtctacagtctgaggttgtcggcaaatgccgacaacctccactgactaaattatttcgcgccttggtctgtttgcttggctaatacttcaagtgaagcagtataaacagctccttggtattcattgcctgcattctcgtctaatttcacgccaaaattaagatcaatgtattggccttcatccaattgccaaaattcgttgtcaggtccttgcaagctgccatcgccaagcacaaactgatcagcattttcgtcataagcttgttcatcaattaaggcagctacaacttcaacgccatttgcctcggccgtatgtgaaaaagactgaacttcattagtaatgccattaaacaattggtctaacttatattgtgcatcttcatacacatccctgcctggcgttgttgtatacttaatcgcaatgtagccaactttatacgcatcgatgggtacattcaagtcgacagagtggtcataggttgcttgcaaatgagtgtcaagggtgcctgtattttcaattgagagccaatcgccaaagattagctgtgaaggagcaaaactttccgcttgaacgatgttgccgtcaatgtcctcgccatggttaatttccagcgttccatttttaatttccccagtagcagacgtttcccctgtaaaccatgaaaacgaccctcctgagccgagaacaataactaacgctcctacaaaagctgtagcgatcatggctaatttcaatgattttacctttttcatcaagaagcctccttgcgttttttttggatggtttcgtagaacgataacagcaaatacccagcaatcggcacgacaatcaacaaaccataaccaattggttgattgattttttcagcaactaaaccaactttaggaatggtgaacatatgggtgccgacaatttgttcttttacgattgggtcttcgtctacaacgttgttgttatcgccttgcgtcttataatacgtctttccattgctttcaaacttctcaacaatccggtgtgtgaacaagcgccgttcaggagccataaacgttacaacatcgccaatgctaggctcctcattctttttcatgatgaccacatctccggcggaaaatgtcggctccatgctgttggacaagatggtatagcttgtccagccaaacagctcaggtcctctgccgtcactgccctttccttgaaggacaaaaaagagaacgaggaagaacaaaaacgatgcaatcccggtaatcgccaattttccgattgttatccacatgttgaccataaataaaccagcttcctcaaaaaaaggggaccccccttctttattaagatgcaaaatcgaaagcatagacaggcgtgccaattggttgcgcaaccaatgcttcttctgaaacatacgtgccaaacggaattcgatatacttcactttggtcagcgacgtttgtcaacgtcatataccctccgtacaacccttctgctgccgttttcggtgcaatgagaaaggcattgttctcgactgtctcgcctgctggcaccgtaatcgttgaattggtttgcagagtaaggccattctctccggcaggaagcgttccattggcagtgtggaaggatgcatgtacattgaatgtctttgcttcagtaccgctatttgtcaagcgtaggctgtgacgttcccggatattgcctgcatccgtactaacgaaaccaaagcttaacccgcctgttttgtcttgaatcaaggctaaaaggtcgtcctcgacgtggtaactgtcaatcgatgcctgaatcatgaccgttgattcaaccgcagccactgggttgatccggcctgcccctatttcaaacacattgtattcctctgtcattggcacagccgtattcattaatttggtcttgatgtccgcaggtgtctgttctggattggcttgaatcatgagtgccgcaaccccggccacgtgaggggaagccatcgacgtacctgacgagcgtcgataagcaaactcataatcgccagtgaactccggtcctgccatatagcttggtacggtagaatggacatcgaccccaggggcaacaacttccggtttaattgccgctgtgtagttgaccggcccccgtgaactaaaatcggctagcaaatcaccggtcgtcacgcttccactcatttcgccaaatgttactgttgccccgtcttccaataatgaagcgatcgcctctccgtcctcataagttaaagaaaaactagggacatagttgtggcccgcaccagcatagatcggattatggccatcccctggaagattgttataaataatgattgcctctgctcctgctgctttagcgtttgcaattttatcaacaaatgcaagttcgccacgaatcacaaaagcgacttttccgcttacgtctacttgttcaaattctgcaacggtaccaagcccggcatcaactagctcaagcgtttggttgctgaaatcctctaggttgcctgtaaacgattcggcaatgacacggaggtcgcctgtcagctcttcctctcctaattgatacgtactcgaaaattcagggatcgtaagagaaacattgcttgcccctacagaaataggcaatgctgctgccccaggagcgcctactgtgccgagcccattacggccattgtttccagctgatgtcacaaccgtcactccagccaaggtagcattgtttgttgctatgctcgtcggtgctattggatcgttggcattgtttccgagtgatagattgatcacatccatgccatccattacggattgctcaatgccagcaatgacatcagccgttgttccggagccatacgggccgaggacacgataggcatacaaatcgacttcaggggcgacgccagtgacagcatattctgaatcattttctcctgttcctgccacggtaccggagacatgtgtgccatggctcgtataataggagcttccatttgcattaaattctggcattcccgagtttttccagtcctcataagtcgcttccattgggtcgtcatcatcgtcgacaaagtcataaccgcctttgtatacagcttttaaatctggatgttcgtagtcaatgcctgtatcaataacaccgacttttacacctgctcctttcagtccttgttcatggagctcatgaacaccgaggaaaggaatgctgtcgaccatcattgcttccacaggctcatcaacggccttttcctcaacaggcttgattaactcaatgacatcattgctataaatcgcttttacgccttcacgttcaagcaattcttccactttgtttgctggcaagtttacagaaactccattaaaaatggtcgtatattcccgttctacataagaagaagcgttctcggacgtatctagcacatcggccaatgtttctttaaattgctcatgcgattcttctacattttcccgtgcttcttcctctgtcaaatcgtcttcaagctctttcgaaacagcaagggccacttgttctggaagttcatcaaactcgacaataaccgaaacgtcttctttactggccaaatcaatctcatcagctaaaaagagcgattgcgcctcgcccctttcagcgattgccaactggggcacaaccggtacagagcttgccaccatacaaagagacagcgcactcatatacatcgttttacgtccgcttaatgcacgcgcttttttcaaataaaaacaccctttctgaatctttttgtcatgcataaccgaattatatcgaaaatgcagaaaacaacaacaaaattcatagggcttttgtctattcaagaaatcgtcatttccccgagaaaatagaaccattttttcatttttagggtccagaaaagactgtgccaatacctttttctattttcccaactcatcttcaatttttaactgaaagaaaaaaaccagcccttctccctatttttaaaacatggtcaattgcatagattaatggctttattatccaaatggataaaactttacactcatttccgggtttctcctctactctttccactgctcactatatacccgttaaaaaagagcctgcaaggcaggctcttttcgcttataacatcacggatttccgctctttcccaacaaagaaaaccatctctttaaatccaatctcctttagcatacgttgaacttcatgataatcatcagcaacgcgctcaggcgtgtgggcgtcggacccaaacgacacagacacaccataatggtgggctcgctctaatatttcatgggaaggataccaaccaccacaatcttttgtttttccagacgtattgacttcgattgcgacctgttcatcggcaatcactttaagcgtttcttcaataatgggtgtttcaatagctgagaacgctggataaaaacctttcatggcatcaatatggccaagcacttgaaacattccactttttgcagattgttgaatcagtcgataataggcctctttcacttcgacacgctctgcctgatttaacccttcccaacgcccttttcgaaaaatgttgacctcatttacataatggacggagccaataacgtaatcaaaagggtatttctcatacatacgtttgtacagatcttggtggtctggaaaaaagtcgctttccattcctagtaggacatggatttgctgcttatactttttctttaacgccagcacttcttcgacgtagttagctaattcgctttttcccatcgcaatgcccggatacagttggtcttcatcgctgtaaaaatacggcgagtggtcagcaatgccaatatagtccatccctttttcaatcgccgcctgtatgtaatcttctatctccccaagggcgtggccacagcgatggtggtgggtatgcaaatcaaatacaacagtcatcaaatcgctcctttcttattgtgcagccttattatacaactttcctttcggacggtttagcgaaaaagaccgcccttcttggcaaaggacggaaaacagccagtgtatggtcaatcgtttatgatcacaagcttgccaatcatgtttccttgttctaacagccgatgcccttctttaagcgtttcggcattcatcggtgaaagcgtttttgtcattgtctgttttaattcaccacgatcaaacatagcagctatatcgactaacaagcgatgctgttcaatttgatcttctgtttggaagacaggacgggtaaacatcagttcccaagaaaaagtaacgcttttcgaacgtattttgcccatatcaagaggccgtttattttcaacgatcgcacaaatggcgccttgaggcttgatgcaagcagccatcccatcccaatgctcattcgtgtcagccatgcagaaaatataatcaacgtctttatagccaagctcttgaagttgaggaagcaattcctgtttgtggttaatcgtatgatgggcgcccatgcttttgcaccatgctgccgtttcctgtcttgaagcagtcgcaatgacattcaagttcgctttagcggctaattggatcgcaatggagccaacgcctccagctccgccaatcagcaaaatcgatttccctgcatccccttcgctaatccgcagacggtcaaacaatgcttcccaagcggttatagaagttaacggcatcgcggctgcttctgcaaaagataacgattttggctttggtcctacaattcgttcatccaccagttgaaattcggcattcgatccttgcctcgcaatattgccagcataataaacttcatcgcctacatcaaatagcacacattcttcgcctacagcctttacaaccccgctcgcatcaaaaccgagaatacgaagcgcctcctccgttttgtctttaggagctcttactttcgtatcaacgggattgacagacacagcctttacttcgatcagtaaatcccgaccgcttggcacaggatctggtacttgttcttctactaaactctccttgtcatcaatcggcaaatagcggtacaacccaattgctttcatgtgaaccagctccctttttttgagttttataaaaccattcccagaaaagcgagaagcaaacatttggctaacttatgggagaatgcacagaaatgacagtcgaactctctagcgctcaactgtcatttttttaatcacttgctcgtgcccagcaactggcctgccctcttgggcaccacctgtttctgtctctgtttgttcggcgatctcatcgactacgtccatgccttcaatcacctttccgaaggcagcatagtcgccatcaaggtctaaagcatcttcatgcaaaataaaaaactgggagccggctgaatccggttcttgcgttcttgccatcgaaatgacgccacgctcatgggagagggggttatcaataccattatttgaaaactcacctttaatttcataacctggaccacctgtgccatctccatttggatcgccaccttgaatcataaaccctggtattatccggtgaaatgtcaggccgtcataaaaaccatcttccacaagcgcgacaaaattattgactgttttaggagcaatctctggataaagttctaatttcacaatgccgccattttccatttccattgagacaatgggtgtctctcccacagctacgtccggtgcgccttcttcattttgcccttgcttgctgtcggttcctccgcacgctgcaagcgtcaacaaaaagcaagccacaatgaacatgccgatctgtttcttatttatcactcatcttcatcccctgtatcagcagagcccgactcctgctcttccgtttgctcatcttcgtcttcttctgcttcctgctcaaggctctctaactcttctttatcctcatccacaacgacgacacgggcagcatctgcttcctgtggtatagtttcctctacattccctcttggcaccacttctacaacgaggccactctctaagtcttgtgattttaatggttcatattcgtcctcatcgacaagctctagtacttcggttgctacgtcgtaatgaaaacgcgtgccagattcataatggccatcttcccctaaaacaaagaatgtgttttgctcttcattgacattcgatacaattcctttaatggaatattcttttgttaaaatgacaatttttgtcgctttcgtttcttctggctgttgagacgttgttggttctccatacacttctacttctagctcgggctttagaaaggactggtcgacacgtaaataatcatttaagtgtttgacatatatttccgttcttctatttataaggacattcatttgcggatttgcgtctacatcaaacgaagtgatcgttggtgcaggttcgctgctttccccagaaacgcccacgcttttggcgtctgcattcgcttggtaatcgccctcaaattcgacgtctacaatcgtcccttccgtttgaacaacatcatcttctgtcaaagagatgccgtcattttgtccgcagcctgccaaacaccatagcgcacctacagcaaacaggacttgcttcaacgcatttcacacccctcttgctcctttttacctagtataaccgattctatatttgatgtaggggattcaagcagatttcattaatatcacacaaccaatttgacaaaagcccatagtttgctttcttttggtcgttgacagtcaccatgctatactgtttgttaaacaaaagcaatcacgatgatttaataggagtacgatatggaatttaccgttcaatatttatctttttatgccgttcaagtcgaccatgagacggatacaaaacaatatagccattaccaaactttagacaccgatgcttttgaaaaaagccccctttctgcctttttagaaggggagctaaaaaaaatcgtcaaacgaaaagcccagcaccatccaaattcagacgcagcgccgactaaaatcggccgctttgtcgcagaacctggccatcctttaagttctaatccaaattataacctctttcaacgcgccttaacggccgactcagttgctgctttccaaaaagaaagcgaagcctttgtgaaaacctatctacagacaagcgcagtacgcggaggcgtctttttagtttgcaaagctgtgcccaaaaagtattacagtgacttatttttattcgtgctcaaatgcgattttcaggaaaacgtcgccacgcttgccgattccaaaacactgattaaaaaagtcgaacgggctattacaacgaaaaatatgaaatcaattcaatacccacatatgattgaggaaggcatggtggaacaagcggaagtcaaaatccaccagtcttcccacgcccgatacttcgaagattttcttccttacgtcgaatatggcgattcaatgccgcaaattttgcggacacaggtacaaacgattatggaagaacatgcagaggaagcatttgcccactctgtagaagaacgcaacgctttcaccgaaaaaatcgagctttgggcttcaagcgaaacgagagagctgcaagaacaattttctacccatgaagtgatggaagcgtctgcacaaatcgccgaacatgcgcctgatgcttcgacacgaatgaagctcggcgacacagacattaaagtgcccattgctgaatttggcgaaaccgtccatttagcaaaactcggcgaccgttatatgctgcttgtcgaggcagatcaagtccagtttgacaagcatgtatcgccaattgagtttttaaagccagaagatgttcaaaccgtgtttgagcgcattaaagcaaagtccttgtctgtccagcaataagggggtgtctagatgttgacgcatgaactggcaaatgaaattgtcacacggacaatggacatcgttcctagtaatgtgaacatcatgaatgcagaaggggccgtgattgcaagcggtgaaaaaaagcggctttttaacattcattcgattgcagtcgacgttttgcgaacagggaaatcgatctctatcaacccaactggcgactgcccctcagggacaaaacctgggatcaatttgccgatccgttttcaagggaaatcagtcggcgtcatcggcataacggggaatcccgtggaggtggcgccatatgccgagctcgtgcaaatggcagccgaattgttagtcaaccaagcttatttaagtgagcagcttcggcaaaacgaacgaattgcctaccaattactgcgtgccttagtcgttggcgaagtcgaaaacgagcgtacttttatggaaaggctccaagcaactggtcttgactcccttttcctgccgctgcgcgcctgggcgttgtcaaaggcgcacgagcaaacattcccgaaagaactcggccattttttccaatacgaagagcgtggagaattattcttttttgaaacacgtcctgaagaaaaacggttcgaatcgttcttgcaaaaaaacaactgcttgctaatcgccacgtcagggccagtcgcccattcctttggcaccgttgcttcctcatgcaacatagccagggcagcactgtctctttatgaagaagacgtacccaccactgaaaagcgtctgctctactttgaggaaacaatgcttgaaggacttgcattcgagtggcaacaatcaggaacgattcaaccttttttggcgctactctctccactgctcgcatctaatcaatctgctgaactgatagagaccatcaaacagtactttattcataatggcgatattaagaaaatcgccaatcaccaatttgtacacagcaatacagtccaccaccgtttaaataagatcaaggcgctgactggaaaaaacccaaaagtgattcgtgagttaactgatttgtttatcgcctgtttgctgtaccaattaaatggtatacaagcacaaggaaaactcttgtagattcgttttctttgtgcttcgccacagtgcttacaggctagcgttgctttataattgttattgtaaccgatttcaaatattgaattaaatgcaacggcgcctagcgtaactgtgaagtggaacgttgctgacagtgcgagtcccttcacatggtttacttagcgcaatcgcatttaaaactcggcacccgctcctcaatagcgacggatgctatccacgattccatgcacgaaaggagaaaacgatgcaaaaaatttcaattgctcctgattcgtttaaagaaagcttgacagccctccaagcagcacaagcgattaaagcaggatttaaacgagttttcccccatgccatttacgaatgcatccctatggccgacggaggagaaggaacagttcaatcactcgccgatgcacttggcgctacaattcgtacagctactgtaacaggacctctcggcaaccaagtcgaagcagcctacgccttcgccaaaaaagaacagatagcagttattgaaatggcagctgcgtctggcttgcatctcgtgccaaaagataagcgcgacccgcggaaaacaacaacgtttggaacaggcgagttaataaaagacgcgctggaacagggcgctaaacggattattctcggtctaggcggcagcgctacgaatgatggcggcgcaggttgtgcacaagcacttggcatccgcctcgaagatgccgaagggaaagagcttcaacaaggctgtagcccccttattaagcttgctcgtattcgtacagaaacaaagcatcccttgcttgcggatgcttcgcttgaaattgcctgtgatgtcgataatacgctgcttggtccaaaaggggcttcagccatttatggcccgcaaaaaggcgctacccaagaaatgatcgcagaaatggaaagggcgctcactcattatgcagccgtcattaaacaacagctcggcaaatctgttcagcacattgctggcgctggcgcggcaggcggtttaggagcaggattgctcgccttctttcaaccaagaatcgagtctggcgttacgctcgttttagaagcaaccggttttcataagcgaattgctggttcagagctggttgtgacaggagaaggacggctcgattcgcaaaccccttacggcaaaacaccaataggcgtggcgaaagcagccaaagcacaacaaatccctgtcatcgccgtagctgggcaattaggcgatggttatgaagcgatcttcgaccatgggattgacgcagccttttctcttgtcccaggcgcgatcccattggacgaggcaattgccaatggggccgcctacttagaagccgttgcagagcaaatcgctcgaacgtacgcactgggtttggaaaacaaccgaaacgactaatttacatggcattctcccctttctgtttgcatacgttgtaaggaaaggggttgtctgtttctatggccattttgaggcactcatttaacgctgtagccggcatcttagtttttctcgcgtccctttatttaagctcccataatgaaaacgtggaaggcaccaggcaattcgctcctgcctacttgttgttatttgttgtatgggtatgcggcttctccctccaatttcgtccatctacacgtcttaccggcattgcgattacgctcgtcccactgttttttttgttgttttcctttttctttcatattgaacgaggcgggcttttttaacgataagaagcaggcaacataatagcaaaaagggttctgactgtttcatcaaaaccctttcccgttttttcatttatcctgtgcatccagtctgctaaaaagagagccgtttcccttttattctccacttcgagccccagactaccgcttgtacgttagatttttttatattttccttcgtaataaacaagcggctctcggtctgtaacgagcacatccctcactttgccgaaaaacaacgtgtggtcaccttgcacgacagtatcgtgaacatcacaggcaattgtcgcaattgccccttttatcgcgggaatgcctgcaaactcgctaaagtcgacatgggccaactctttttgcccggcaaaatgcatagacaattcttcatggcctgtggccaatatattgaccgaataatttccggattgttcgataatcggtttcattctcgctttattagcaattgaaacgacaatcaacttcggctctagggaaacagacataaatgcatttgctgtcatgccatggttgtcattttcccacttcgtcaatacaacagtgacgcctgtggcgaactttcccatcgccgctttaaacaaacgatcatccatcgatataacctcctctagcgccaattgctgtatacgcatttctttccagtccataatagccagaaagatttaaactttgcaaggataaggtcttctgcatggaatacaccaattgctttgcctacacttacgtttatgcaacatacaggccatttacaactcgtttccggcgtggacgttcgtttaacctttacaaacattgttttcgttcccacgaaattggaaaaagcaccctctctgctacctacttttgcaaaaatgcgttacactaatgaagaatgcatcactattgtgaacgtgcccaaccataagcacatatgttaagaaagaaagtaggcgatacgatgataacacttaaatcgaagcgtgaaattgcgctaatgcatgaagcggggaaattgctagccgattgccataaagaaattgcggaacggatcaaacctggagtgacaacagaagaaattgaccacttcgttgaatcctacttaaaaaaacatggcgcaaccccggaacaaaaaggctataacggctataaatacgccacgtgcgcgtcaatcaatgatgaaatttgccatgggttcccacgaaaacagcctttaaatgaaggcgatattgtcacgattgactctgtttttaaccttaatggcgcccttgccgattcagcttggacttacgcggtggggaatgtatccaaacaagcttcagatttgatgaaaattacccatgaagccctttacaaagggattgaacaagcacacgtaggcaaccgcctaggcgacatcggttacgcgatccaatctcatgtggagcaagcaggctattccgttgtccgcgacttcactggccatggaatcggaccaacgttgcatgagccgccacaagtgctccattttggtgctcaaggcaaaggactgcgcttacgagaaggaatggtcattacgatcgaaccgatggtaaacatcggcaagtacaacagcacgcttgatgctaacggttggacagcgcggacagttgacggcacattgtctgcccaatacgagcacacggtcgcaatcacaaaagacggcccattgctattgaccgaccaacaagaagaacgcccgttttagtctgataatacgattgactttgtcgataacacaaaaaaggcagctaaattcgctgccttttttacatctataagtcttgcgacaagcggatcatatcgacacatggcaaaccgttctcttcaataggctcttcgtaatgacgcacaaagaaatcacggtccacatgagtgatgcgaaacccacatttttgataaagcattaattggctcgctcctgagttccctgtccctacttcaatcgttttataaccctgtttttttgctgttgctaccgcatgcgacacaagctgtttcccgatttttttgccttggtgtgcctcttccacagcgacgttgacgagttcaaccgtatctggtcgggtcggcactaacacatattcgccaataatcgtgccttcttcatcctctgctacatagcatgtgccccgctggcaatagtcttggacaagtttttcagacggatctgccaatagcaagagtgtccatggcaacggttcgcccgcttctagccttctaatgttcatgcagctaacaacttttccacagaagccagttcgacacagacagacacgacttccattgcttttttcaactcttcaacagacgggaatgttggtgcaatccgaatgttgcggtcacgcgggtcttttccataagggaatgtggctccagcacctgtcaaaataacaccagcttctctcgccaaagagacaacgcgctttgcacagccatctagcgtgtcaaggctaataaaatagcctccttgcggttcggaccactcggcaatgccttttccgcctaactcctctgttagtgtgcggttgacttgatcaaattttggtttgatcagttgggcatgttgtttcataagttcgccaacgccgccaatttgctcaaagaagcgcacatggcgaagctggttgattttatcgtatccgatcgtttgcactgacagctgctttttagcgtaagcaaggttggcttctgagctaacgaaggcagaaatgcctgctccaggaaacgtcactttcgatgtggatgcaaacatgtaaacgcgatcagggtagccagcctgtgcacaagcagcaaaaatatcggctagttcatctggtgtgtctgtcaaatggtgaaacgcgtaggcattgtcccaaaaaatgcggaaatcttcagccttggttttcaatgcagctagacgttgaacggtttcatttgaataagtgactccactagggttgctatatttaggcacgcaccaaatgcccttaatcgtttcatcgttggccacaagcgcctctacttggtccatatccggcccttcagcggtcatattaacaacaatcatatcgatattaaataattcacaaatggcaaaatggcgatcatacccaggggatgggcataaaaatttcactttcggcagctttccccacggcgtctgtccctcacctgtcccaaacaacaccgcgcgggcgaccgcgtcatgcatgagggacaagctcgaattgccgccgacaaatacgttgcttgcttgtacgccgagcaactcgccaaagagcgcctttgcttcaggaattccatccagctggccataattacgaatatcgccattgtgggttgctttcacatcttcttccgataaagcacggaggaggccatgtgaaaggtcaagctgttctggtccaggttttccccttgacatatcaagctgtatgttttccattttgtacatgttgtattgcttttccaattcttcttttcttaactccagttccgccgtcgacaaatttttcaaatcgctcatgctgtgcaactctcctcgttttagcttctatctatttcattgtagaccagctttattcaaatgttcaactgcatgataacacttttaaaaaaatcgaaaaatgaaagagcgattgggacattttaattgggggagactaggcaaaggtcggcgatgattgcattaacgtgcacagcgtttccattacgagcagctatgacattaaaatagagcttggcaagcgctaccagatgccttgcttttccaacacacctatggtatttttagagcgctttttccatactgttcctattaaattaggctcgacgtatttcctaatagagtggagtgagatgcaatgattcgccaaggcacgctgaacgatttgccacaaatcgagcaaatcgccatcgatgcaaccaagcaaatgaacttagaaggcagcgatcaatggacgagcgcctatcctacagctgcccattttcaggaagacatcgaacaaggcactctttatgtttatctagaaaacatgaggattgttggttccatttcaattgatcaaaaccttccagttgaatttaacgagtcccaattaagctggaaaacgaaacacgaaacagccggaacgtttcatcgtttagttgttgacccagctgcccaacaaagcggcgttgctgtaaaattggttcagttcgccgaatcgtattgccgcgagcaaggcttggcttctttgaaaatggatacatactcgaaaaacaagaaagcgcaaaagctgtttgccaaactcgggtataaaccagtcggaacattttactatccgaataaaaaagacccgttttttgcttatgaaaaagcattaacatgaatctagcaaaacaaaaaagaagggtaccccttcttttaatgcttttccaatttactcatatctagctcgtaatcgccctctgctgctttagctggtttagcgttaaagatgctgtcgcggttaatgttcaacttttctgctgcacggtcagcgtaagggtcgatcaactccgtatcttcattcaacacgaattccaatgcattgatttgcgtgcgcaaacgttgcatcgtccggtctaggtaaatgtaaacttgctggtcatgttggctcatgtttttaaaactttgttcgtcgactttcatttctttaaccttattaatacacttgcccaattcttctcttaaaatattgcgttgttcttttacggttagtacgcttctcatttctgtcatcctttcagaatgccattagttttttgggaaagcccatagtgcatttactacagtataaatgttttattcaaaaatatcagctcattgcagacatttcctcatagatttacaaaatccgtaattgacagctaccaagagctgcgttattataatttctaattcgagatgattaatttcgaggtgaatccattgaaccaaagccaaacagattcgctgaagctgtttacggtgatgacgaaagcgcttcagtctgtgcgcataaaagcgattgccgatattaaaaaacacggttttaatccaaccgagtttgccgtgctagagttgctttattcaaaaggcgaacagccagtccaaaaaattggcgaaaaagtgttgattgctagcagcagcattacctatgtcgttgataagcttgaaaaaaaagggatgattgtccgcaagccatgcccaacggatcggcgtgtgacgtttgtttcccttacagaaaaagggcatgattggatggctgacatctttccccgccatgctgaagcaattgacaccatctttgcttctcttgacgaggcagaaaaacgccagctcattgatcaattaaagaaaatcggttactatgccgctcaacttccttgatgggggggcggcacaaaagccgcttttccaaacagctcgcagcaacagcccgttcctcgtcaagactcgtctttctactgcgttcgtttgcgcaagaatggcctctgctttcttttccttttctcgctttctctttcattccattttcatcggcttttccgattttcaacaaagaaacgattgacattgccgcttaacagttgtaaagtgaagcatgcaagaaaacgatatattcctcgttaggtgaggctcctgtgcaggagatacgctgctacccaaaaatgtccaaagacgccaatgggtcaacagaaaccatcgacataaggtggtttttaatgtagctggcaatagcctatgccgcacagtgctaaagctctacgaatggaggctatttttacgcatgcgcgtttattcgcgtttatttatcatgtgttcgaacacctccatagaggtgttttttcattttcttataaaaggtggtggtgtgggatggatagtttgcccaatccgaggttaggctgttatcgaatgatcataaataaaataatggagagggttcctcctgcgccacgtggaagcagccctctcgtttaggggggatacacatggatcaattaaaaaccgatcggaaacgaaatgaatataaaaaacaaatcgtcaaacacctcgtctcccggaatctccgcgcttttcgggaaacctttctagagcttcatcccgcagaccaagtcgagttgttccatgaaattgaagtggcacaacaaaagcaagtgctgctatttttaagcccagcggaattcgccgatttgtttgaaggacttgagcttgaagaccagctcacggtattccaaggcctcagctatcaatacgctgtttcgatgttcaataacatgtctgccgacgatgttgccgactttctcgctgaaattgaaccggaacgagctaaagacattttaagttccatggatatggaagaggcaaaacgagtcgaagaactgatggcctatgcgccaaaaacagctggcgcgattatgactaaagaatttgtgcgcttgtccgtcgaatcaaccgccaaggaagtcattgaggaacttcgtgaatcagcaccggatgcggaaacgatctattatttatacgtggttgacaaagaccaacgtcttgctggcgttgtctcattacgtgacctcattatcgccgtcccagaaatgacggttgacgagattatgagcacacaagtcgtatcggtcaacgaaaatgaagaccaagaagacgttgcccgcctgatccaagaatacgactttctcgccgttccagtcgtgacgccagacaagcgcctcgtcggcattattaccgtcgatgacgtgatggacgtccttgaggaagaaattacggaagactttggcgagtttactgcttcccggggcgccaccgacttgtcgttgaccgcctttaccgccgcgaaaaaacgggcgccttggctgatcctcctcatgttttttggtttgattacggctaatattattggccagtttgaacaaacactcgagcaagtcgtcttactggcagcgtttatgccgatgttaatgggaacggccggcaacaccggcacacagtcactcgctgtagccgtccgcgggattgccaccggctcgtttgagcggggcggcgttatgaaaacagtgaagcgggaacttggtacaggcattatgcttggcattacatgcatgattgtccttatgggcattattagtttgttttacaaagggaatttcttgcttgcttttattgtcggcatctcccttttcttcgccttaagcgtcgcggccgtcattggcgctaccgtccctatcattatcaacaagctgaaaatcgaccctgccgttgcttctggcccgttcattactacaatgaacgacatcgtcagtttgctgatttattttacagtcgcaacgacattgattgacaaactgtaaaaacaatctaggtttctgctttttcaaatgtcgagtggaaatgagcgtgacaacaacttaccgtcctgatccagggcggttctttttatccttttcgcccctaatgcggctcctgttctgctatcttaaccagccttttttctgatagtacgaaatcgcttcaatccggttgccgacttcgagtttatcgagaataaccgacacgtaattgcgcaccgttccgtttgttatcttcagctcatcagcaatttgctgggtcgtgcgtccttcggcaataagcttaagaacttgctcttctcgctccgtaagtggcgtttcattgtggtagaccatatcaaccaattcaggtgcgtaaactctacgcccatccataatcgtgcgtatcgcagcagccaaatcctcacttggactatcttttagcaagtatccctcaacacctgctcgccgagcccgttcaaagtagcctggctgtgcaaaggtggtcaacaccatgactcgacaggagtggtctttcagttcataagcagcatctaacccatccatgacaggcatttcaatatccataatacatatattcgggtttaacgctttaaccaatttaatcgcttcttcgccgttgtgcgctttgccaaccactttcatatcagcttcaaaatcaagaagcgctcccagagcccctaacatcatttgttggtcttcagctatgacaatttcaatcattgtacacttcctccgtctttttcaccggtaactggaacacgcatagccaccaagaatccgtcttgcgactcgtaatgcaagtccccattaataaattctagcctttctttcattccttggagcccgccctgtttctcatctgtcttgccagtgaggccgtttccattgtcttttatctccatgcaaaactctgtcggtgtctgggcaaatgtaatcgtacacctatccgctccgctatgtttcacgatgttggtcaccgcttctttaaggcacatacatagaacattctcaagaagaggtggttttttcaacaatgcatcatcttccccttttatcttcaactccacttccgccgccgtaagaatttcttttatccgtgctatttcatcacttaaacggctacgttttatatcagatacaatctctctcacctcattaagagtggttcgggcgatcttttgaatttcctgtaactctatattggttttttcttgatcgatcggtagccactttctcgccaagtcactttttataccgatcaacgaaagcttttggccaagcgtatcatggagatcacgggcaatccgctgccgttcttccgctaataacagttgtgctattttttcattcgctgtctcaagctgactttcaagtcgctcccgtttatggcggttcgaaatggtaaacggcaataagagaacgccaattaacgcaatggctataaatgggagctgaaccataaacgtctcattctgaatgtaaaagccaatcgttgtggcagcagccgtagtcgttacatgtgcagcatatatagcaaagaacccttttctgttttgtacattcccgatgaaaaaggcgagaaacaaagcgaaataaatatacccaaaataaaccgtcatcccaatgttaatggccatttcaattgccactgacatatacatcgtccagccttttttaatgaaagacagtcggtatgttgtaaaaaacagcataatcataatgctgccgattgtaatctcaataaacgttgccgatgaaatcacaaaataaaagggcaagacacaaaagataatccaaacatagaggcttaagcccgtattcttaggaaaaatatgaaaccaattttgcactgtattccctccttgctctagtataccaagtagcgcgttgaatagccttccccgcaaacaaaaaaggctattctaatcgaacattagatagcctacacggattcattataaggagcgatgggccgccagcttcatctttctcatctttttaaagtctccaaaactaacgaacgtcttattcttctcatcaaacaagcgaaattttagtgacgctaagcttgtcgcaagggtgatggtagtggctttttgtaatggcaccacttgttggtgtgtcttttccagattgtaattaggcactttagggcttaaatgatggacatggtggaagccaatgttacccgttatccactgcaatggcttcggcaacttgtaataagagctgccctccacagccgccttcacaaaatcccattcggcttcattttcaaaataggaatcttcaaactgatgctgaacgtagaaaagccaaataccggctgcacccgcaataaacataagcggcccttgcaccaaaagaaacgcttgccagccaagcaaccaaatgccggctgcatatagcgccactattgccacattggtaacatgtgtattgaaacgctccttacgtttcgcccctcttttattcaaccgattttcaattaaaaacaaatagagtggcccaagcccaaacatgataagcgggttgcggtataacctgtacgctgcttttttccagatggaggcttgttcatactcctcaatcgttaacaaccaaatatcgcctgtgcctctcttatccagatttccgctagtcgcatggtgcatcgcgtggctccgcttccacttttcaaaagggaaatgagtaatgatgcccaaaaatgtccctagcacccgattggccttggcgtgtttaaaaaaagaaccgtgtgtacagtcgtggaaaataataaacaacctgacaacaaatccaccgcctattaccgagaaaagcagcgacagccaaatagacagagacaggctttgataagcagccacccatagaaatgctagtggtaataccgtgttacaaagttgcagaagacctgctcttgtatctgcttgcgcgaatgtcgccgctttacgtttaaggttcatttgttttgtttggctcttcatggctcactcctccagtcattctgtatggattcatgatacgaaaatcaatcagccatttacagtcacatctgtcaggagcgttacatgacaaatgtcatgtagggtgggaaggcttgccaaaagcccactcctccatttaaacgccaaacaaaagaacaagatcgaaatagttaatcacggtttctatcgatgtggtctctcttaccactctgtgacaatgtaatcaattaaatggttgtcttcgtttttacgaaatttgctagcagatacgcctacagtctttttaaatacttttgtaaaataattggggtcatccattccgacttggtaagccacttccgcaatggtgtcatcggtttgcgccagcaaagaggccgcttttttaatgcggataatcgttacatagttcattggcgtaatgtttaattctgtcttaaactgcttaataaaataatatttcgaccagcctgcttcttgtgcgatttcctctaatgtcagtggtcttgcatagttcgcttcaatataacggattgctcttgcaaggggttcttttactacttgtttcggaggaacttctagaaagcggaaacacgacagtataaattcatatgctttttgtgaacctgtataggagtcttggatttctccagctgccgtttcggcatacaatttaaacaaacgacgaattggttcgctgtctttttgtaaggaaaaaacgggcccgtacttgttctccatatgtttttgcatacgcaatgcttcttttccttcaatcgtgacataaagaaattcccacggctctgtctcttcttctggatagtaataacaatgggcacttggcaacgaaacgaaaaaagcttggcccgcttccactttataaagtgtcccttcatggaccaattctccgtagcctgaaagcgtgtattgaaacacaattttttctcgttccatccgttttgtgccatcccaacgataagcttgatcggtttgtgtttcccaaccaacattccataaattcatgacaaacggataaggctgctcctgaaaacgaaagccataggaaacgttttcacttgttttcgacattgcgctcccccctttctcccagtataaagacaaccgttatgaaagcgcaatattatccataaatcaaacagcaattttctactgttttcacagccgcctctctatactatggataaatggaacaaagggggaaacgccatgaaaaagattacgtttatcggcgcaggcagcaccatttttgcgaaaaatgtactcggtgattgcatgcacgtgccggcgctgcaacaatttgaatttgcgctttatgacattgacaagcagcggctttcggaatcacagacattgcttacacacttaaaaaataacttaaactcaacgatcacaataaaagcctatgacgaccgcaaagaagcgctacgcggcgcctcctatgttattaacgccattcaagttggcggctataaaccaagcacagtcattgactttgaaatccctaaaaagtatggcctgcgccaaacaatcggcgacaccatcggaattggcggcttgttccggtcattgcgtaccattccagttttgcttgatattgcccaagacattgaagaagtggcgccaaacgcttggtttttaaactatacgaacccaatggctgtcttaactggcacgctttcacgctacacaaacgtgcaaaatgttggcctttgccatagcgttcaagtatgtacacgtgacttatttaaacatcttggaatggaccatacagggattgaggaaaaaattgctggcattaaccatgtcgcttggctccttgaagtgaaaaaagacggccaagacttatatcctgaaatcaaacggcgcgccaaagagaaaaacaaagaaaaacaccacgatatggtacgatttcagctaatggaacggtttggctactatgtaaccgagtcttccgagcacaatgccgaataccatccgtatttcattaaatcagcctatcctgagctgatcgacgacctcaatatccctttggatgaatacccacggcgctgcgtcagccaaattgaacgatgggagcaaatgaagcaagatcttgtcgacaatgctcaaattacccatgaacgttcgatcgaatatggatctcgaatcatcgaagcgatggagacaggtgaaacatttatgttcggtggaaatgttctcaatataggtggcttaatcgccaatcttcctgataaagcgtgtgtagaagtaccatgcgttgccaatcgttctggcattacgcctacctatgttggcgagcttccagagcaactggctgctctaaacaggacgaacattaatacacagttattaacgattgaagcggcaataacaaaaaaacgggaacatatttaccatgctgctatgctcgacccccatacgtcttccgaactgtccctcgatgacattgttagcttatgtgacgatttaatcgaagcacatggcaattatttgcctgaataccgttaaggcaaaagacgcgatttgcaacatgcaaaatcgcgtcttttatttccttttcgtgcgcaagcgaatataccatagtaggatcgctatcacagcaatcgctattcctacataaacgacgtctgaaaagacactcatcgcctcaacaatatcatgccagttctcaccaacagaagcccctaaatgaacaagaatggtattccaaacagccgtgccaagtgtcgttaagcaaataaatagccaaatgttcattcctgacatgccagctggaatcgatattaaactacggataaggggaatcaggcgacagaacaacaccgtccacggaccatagcgatcaaaccaacgatcagccttccgtacatcctctttcgtcaatcgtaatacatgcccgtaccgatcaatcagcacttccatccgcttcacatcaagccatctgccaacggcaaacaaaatgagcgctccgcacagcgagccgcctgtggcagcaaggacgacccctgttttactaagttccgtttgctgcgtcataaacccgccaaatgtcaaaatcacttctgacggaatcggcggaaacacattttccaatgcaatcaacgcgaaaattcccaaataaccgaattgttccattagttgaagcagccactcttccacttcatctcctccatctctttccttcctaaaaaagtatagcatgcccttttctgattctttgtaaaaaattgtggtcagatttcccaatcgaaaacgaattgcattaggaacgtatgttcgttatactcgattatacgaaagcatgttcgccttttttattttttctttgattttttctggatagctttctctttatacaaaaaagactgacaaggaggcactctcatggaatcgtatgaagaagaactttgccggaacccgatcatttctaggtttttagaagatccggaaaacaaacggctttacacccaggcagtaaacgaaccaacatctaaaaacaagcaaatccttgacgaggcttttaaacattttttcgtccgtgttaaagtgatccattatattagccgcttaatagctggctattctgtcgattttgacaagcgtatccgtaaaaacgaacaacagctgctttccttagatgccctcttccacaatggacaaacgacattgcttgatatgttggcagctggcgatgtcattaaagatgcagaactcgttcaagaagaggacgggcactatgaggagctatttgaaaacgaggtgctgcaacaggccttccaggaactaaaacctttgcaacgtgaagtgctcgtttactcgttcttttatggataccggaataaagacattgccaagcggcttgctatatcggaacagcgtgtttcttacaacaaaaaacgaggcctcgaactgctgaaacaaaaagttgcagggcaaacgaaaaaacaaggaggcatgccctaatggcgaaagaataccaggactatgaaacaattttggcagcctttgatttaaaaataaaaaaaagcctctattcaacagacccggctaaccgcgaagatttagaacaggaaatcaagctcaaaatctttgaaaaaatgcctgtgatcgaaaatatgaacgcccctggcttttacgaattcgtccatggcgctaatatggcagcggaaacaaaggcgctgtatgcactaaaaaaagacgggcgccgctagcgcccgtctcagactgtagacaaactctactcttttaccgaaccaagcacaatccctttgacaaagtacttttgcaaaaatggatatacaatgataatcggcagtgcgccaatgaaaatttgagcagaacggactgtcctctcagacaatgctttcacttcatcaggattgacattgagctgtgaaaaatcattttgaacaataattgtttgcaaaaatgtcgataacggatacttggtggagtcagtcaaataaatgagcccgtcaaaccatgaattccattggcctaccatggtaaacaggccaactgtcgccaatgctggcaaagagataggcaaataaattttaaataatatttggaagtggcccgccccatcaataaaagcggcctcttccagtgactttggcacgcctgttcggaaaaaatttaacaacaaaatcagattaaatacatttacagctccaggtaagacaagggcccaaatcgtattgatcaagccaagattttggacgaggatatacgtgggaatgaggccgccattaaaaagcatgacaaacacaagtgcatacatgtacatttttctgcctttaaattcccggtcttcttttgaaagtgcataagcggcaagtgtaatcgtgacgaggctgattatggtgccaaggactgtccgaaagacgccattccataacgcacgcaaaaagttttggttgccaaacgtctgctcccaagcagacaccgtaaagtcgactggccaaaaacggacaagattggcattggcgggagcgggcgcactaaaggagacggcgagtatatggataagcggcatgatgcaaatggcgctaagcaccagtaaaaagacaatattaaacacagaaaaaattcggtatgtccggctgcggtaatgcatgccacccctcctaaaaaatccggtagtttgcgtatttgtaggcaaggcgatacccaattacaatcaagatgaacgcaatgactgatttaaacaagccaacggcagttgcatagctaaaattaccgccaattaacccttgccgatacacatacgtatcaataatatcgcctttgtcatataccagcggattatataagttaaagatttggtcaaaccctgcatttaaaatattaccgagcgccaaagtcgctactacaattgtaataggcaaaagcgcaggcaacgtaatataaagcacttgctgaaaacgattggcaccgtcaaccactgctgcttcatacagactcgggttaacccctgcaagggcagctaaaaagacgatcgccgaaaaaccgaagtctttccagacatcactggcaatgacggttacgcgaaaccagtcgccatcgcctaaaaagaagattggattaatgccaatgctagcaaggatttggttcactaaaccgccatcgaccgacaacaaatctagcaaaatgccgcctaaaatcacccatgaaagaaaatgaggcaaatacacgagtgtttggatcgatcgttttaacgccataacccttacttcatttaacagcaaggcaaacatgatcggaatcaccagttgaaagacaattttaaaactagaaataacaagcgtattccaaatcacttgcctgccttcactaaatgcaaaaattcgctgaaaatgttcaaatccaacccattctgagccggcaaagccaaaccaaggtttgtattcttggaaagccataatgatgccgcccaatgggatgtagttaaaaacgatggctaataaaatggcaggcgtgacgaggacatgcaacggccaattccgtttcatgtcccatgattgttttttcttcaacaaagtcggcagcggttgcccttctgtctgagctgacttcacgcaattcactcctttacctgcttctaaactcttgtggggtcatatgaaattctctcttgaatactttgataaaataagatgcatctttgtagccaagtttttttgcgatttgcgaaactttcatatttgtctctgcaaggagctccaccgcacgatccatgcgtagacgatggatgtaatcgctaaacttctcgcctgtctcttctttaaaccgcttcgataagtaggccgcgtttaaaaagaggtgatctgctacctcctgcaagctaggctgttcaaaaaaatgcgcttctacatattcataaacgcgaacggccagctgttcttttttatggcgaacttcctgaaccaatggcgatgtccctgaaaggaagctttggtaaatcttaggcccttcttcccagaacaaaaatggcagcgaggtagtcaatgtgataggtgcctggcattgttttcgtaattgcgttttcagcaacaatatttgcggtttcactgcgtttaaaagcgattcatccccctgcgtgcggagaggataaagcaatatggcatagaggtttttgtacagattgaatgttgctgttgccgttattttcgttagattgctggccagcaccgatttcattccatcaacatcgtccgttgacggctccttatgaatatgaacgaataaccatagtgcttttatgtttgtatccgttggcaagccgtagctttttagctcttgtttggtttcaaaagtgctctttttactggacagccacggtgctatgacctgttcaaaataatcgccaatgttgttgcgaatcgcttccattgaacgcttttgcaactgcaacttctccaattcgcttttccgtatcgacaaagcgcgaccaaccgcttgcattagttcctcgtcgctgactggctttagtaaataatcaactgcttgggcttgaatagctgcttgcgcataggcaaattctgcgtaaccagatagcaataaacattttggtgcatgtggactcttttccacttctgcgagcaaatcaatgcctgacttccctggcattctaatatcggtcacaacaacatctacatttcctttttccaaagaggctagcgcttcacttgctgaacatgcgcaatgtacacggttgatgccaagcgtttcccatggcaaagccgataaaccaagcaccgttgcttcctcatcatcaacaagtagcaattcgaacgatttccctgtatcatccattcagacgacctcctgttcgaataaaatttcgacttttaaaccgccgagctctgattccgatagcacgaggccagagcggccagcaaatgtctgtcttaaacgttgatggacgttgcgcatgccgtaactttcagaaagtacgtcctcttcaagcattcgttgtaattgattgattttgcctacgccaagtttcgggccattgttttctactgtcaggcggcagatattatccccgcttatttcaccggtaatttggatgtatccatcgccttcgatgttttcaattgcatggacaatcgcattttcaacaatcggttgtattatgagccggggaatcgtaatcgtcttcatttcatccggaactgcaatgtcatagtgcaaacgcctttttcgcagcgcatggatcgccaaaaaattttcaacaaggttaatttcttctgctatcgttgttttttcttcctccacttttacacgatagcggaaataatcacctaaatgcagggccattgcttccacagcattggtgttattcacttttgccatatttttaatgtaaaacaggcaattgtataaaaaatgaggatcaatttgtgcttgcaacagcttcaacgatgcctcttgagagcggatcttttcagcaagcacctgttcaatcaatgtttgtatttgttcagccatttcattaaatccattcattgcaatggcgaactctttttgcttaggcactttcatccgcacgctatagtcggctcctttaaacgccaaaatcccatcttttaacctgtcgattggccgatgaatttgcgtgtataaaagccatgcagcagcaacgccaaaaagcaagagcatcgctacagtcacataaaaccacaggcgcgtcgttttaatcggctctaataccttttccatagggacaacgtcaattaatgcccagccgagtgaaggagattgtacgtaggtgacaacgtattcattgtcatcttcttcatacgtgaacatcccctccctttgattgccgccatgttggttaaatttttcaatcacggcctcgtgattgccggccgaaacaatcgcatgatggtctttgttgtaaaacaaagcggtttcttccccagaagactctagtgagagcaaatgggctcgtatgctttccgcataaagccttgcctcaatgacaacattgttgccgacaggtttcccttggcttgggtactgaaaatgttggataaaatacggtttagcgtggtcattatgtggtccagcatccacatacgtccacgaaggtgatagcgccccaggctgttctggcacttgcggcattgtcgaaatcgtacgttcgccatcaggcaaatagacacttacatcgacaagcatgttgctaagttgctgataaagaaggagtttttgctggactgcatctttattcacaaccgcctcataggggctcatcagttcgatattacgaagcttgtctacatctgaatcaatgctaagcgcgatcaaaaactgcgaaagctgccagatgtctgcctccaacctgttcattgtcacttcaaggcggcttaaattacgggagtgcacttcctcacggacaacttgttcgctaacataataaaagtacgtataaagggccataaccagtaacagcaataaaacgatactagcgaccattttttgaaacaaagataattgcttcattttattggctctcctccttcgcttttaggatacaacctattcagcttgcagaggagagctgtttttttactctttgttttcttgaaccgatttaaaccattcattcacttccgctgtcatatcatcgccacctgaagctttccattggtcaacaagagactcaaaatcatcaattggtttttctccataaatcattttgctaaaattctcctttagcaaactatcaagcgtatcgcctttttggagcatggtgtcagtcggggctcccgtaaacatgcttggaatttgagcatcctccccatctacgacaatccgtgctccctcccaggctagttctgggtattgtaagtacattttcttttggaacggcgtttctggctcctgtcctcgggcaaaatcagcaagtgttttaatataaagcgatggcatccgcgccccgtcaaatgtaagcgtatattttacaggatcaatgcggccgccaggaatgtcgtcatcgctgtacttcacttccccatcttcaatgacgtagtcgtagccttctgcaaatccatattcaaattcgctaccttcagttgggttcgcaaaatgatcaaacaaataattttggtaaacaaagaatgcttggatttcttcttctgtcgcgttcgcattgatcatcactgccccattgtgagatgaaattccagtagaacgccctttttgcccgtctggaccacttggaatgtcgtaagcctggtactcagcaccctctacattttgctttagctcgcttaaaggccagtcaggcatccaatgaggaccagcaatgatgccggctcgcccagacgtgaacagttccgccgctttgccctcgtcccaaaggcctgactctggatggatatagcctttctccatccaccgcctcatggtttccagtccttcttttatttctggttgaaccgagccatgttctaaagtaccatcgtcagctaaattccactggtcaggcatgccgccataggcgccaaacacccaatcaacttcagacatccatgtgtttaaagcattggcaaacccaacagctagcccatacgttttctcgccagtgccagtcggatcttcattgacaaaagcatccataatttcttcgatatcatccatcgtttctggaggttcgagcccaagggcgtccatccagtcttggcggataaacaagaccgaatcgccattcatctcgtaatccaaaatagggatagccatccgcccttcctcacggatatagggatcccaagcgtgtggatcagcggccattgcttctttccatgtgtctgaggcatacttgtcaaacagttcaccgacttccatcacacggccagaatcaatgagatcttgtgtaatatcgctgcgcaatgctaaaatcgacggcaattcttcattagctgacatgcttagctgtagctttgtgtcaaaggtttcccctggcccactcgttgtccataaataattcaagtcaatattaaattgttctttgacccaatctgtgtggacattgtcttctatcgtttccccgtcgcgaaagaaaatatcgcccgacacatgcttgatgacattaagcgtcaccggctcttcaaacgtttgtggcaactcatttgcagatgcgactggttcgactgagctttccttttggtttgactcttcgctacacccagcaagcaccagcgtgagcatgccaaaacataaataggtgattttcgtcttcatgcttgctcccccctcattaatgaaaaccctttcataaatgagtgtacgcgcttttctcgttcggataaataggagttttttaagctttacggtatttctttgtgaatgatcgtgctctcttgagtaaacagaaaaaagcccttaaagagggctttcagactgatagaaaaatcaccactgccacaataagaaactgaacggcgccgacaatttccagaatgcccactttcattggtttcatggttgtaccggaaaacttaagggcgcgcagcagtggaaataaatacgccaggctcagccatggattgccgaacaacagtggcaccgctaaaatgacaacatgatagatcttcgagtagtatgtatatggcctgttcttccgctcacgaaatacggattttacgaaaaacaccgtcccggtaaaatagaggaaattaaacagaaccacagccgtaagcccgttatcgaacctgcctccacctagaaaataagcggctgcacctccagtgcagaatagcagaatcgcacaaatatcattgaatagcgcgcgctccgcttttcggcgaacgtgccagatatggaccatcatgaatgcaagcagtacaggcgcgaatcctagcaacaaaggttccagcagcacgactggaatgagaaacgcagcagcgctggcagcatagccgaacccccattttaaccagcttcttttcttgctccccctccttaacgcttgcaacaatggataggaagctaaatacagcaacagccaggcaaggaagagcggcagatggagcaacacgggctgtgcggccatcatgccgatgatatagggcacgctgatcatcgcccagccgccatgctctcgtggaaggaccacttttgtttttttcatctcttcgcccccctttttcagccgagtggagcgtgcttgtcgcccctagcttgctcatttgactcaggcgtgcttccttggggggtgatctgtaatatcgctgaaggtgccgacataatgaacgatgtccccggtttcgtcctttacagcattgatggttaacagttcgagatactcttccccattctttctgcggttccaaatttcaccctgccagctgcccttctccataatttccgtccacatgatctgataaaatgccgatgattgccgccctgatttaagcaagtttggattcctgcccaatacttcctcttcttcgtaacccgtcaatctcgtaaaggcgggattcacagcatgtatgcgctttttagcatcagtcaccaaaatgccttgaccagtcgagttgaacacttgggaagcaacagtcaatttgtcctgataatacatccatacgactagcacaaagctggcgagcgcaacctgcgataaagccataaatccaatcgagtattgacctgtcactgaatggatgaacgagagcatcaacggcgggaaaaatccacccaaaccgcccatcatcgatacgattccattgacaatgcctgcttgtttattaaaataaaacggcaccaacttaaaaataatgccgttgccaagacctgcacaaacggctatcgtcagacatccaaccgtatacaaagcgagtgatggggaaaacgccagcaccaccgccgccaatgtcataccgataaatacccccattagcaaaaacaaaggcttgaatttatcggcaagccaccctccaacgggacggagaaacgttgcaatcaagataaagcctgcggtccgcagccctgcatccactttcggcagctcgaagtgactgaccaaaaaattcggcaaatagacagtgaaggccacaaaagagccaaacgtaatgaaataaaagagtgagaaataccataatttgtcgtttttatatacacccttgacctgttccataatcggggttttgactttcgtttctttgcggtcgccgaagacggcgtttagggcaacaaataccagcagcaaaattaagtatagttggacggtagctgaccagccgatctgcgtagcaatgactggcgctgcaaatgtcgtgatcgccgtccccaaattgcccattccatatatgccgtttactagacctagcttttccttcggatggtatttaggtaacgaagtgacccccaccgaaaacaccgctcctccgataccaagaaacaatcccccgaccacgagatgggtaaaacttgtcgcgatgctgataaagtaaaccggaaacaatagcagaataaaactagtgataaacaccattcgcgcgcccacgacgttggcgtaatagccgagaggaatccgtagaaccgatccaagaacaacagggattgcggttaagatagcaacccgatcggcgggaattgcaatatcttcctgtataaagggcaacagcgccgagatgattacccacaccataaaccctagtactagattcatcgtttgcagcggtagctgcagcttattgatcattctcatcaccttttctgtgcataatgaatggctcttgcgcttgatccccgtctcttattttaagtgaattttttcacaaacataatagggaagttccctgattcttaccaaggaacttccctatgatcttatcaacagactccctaaagccctttaaaaagaagtagataaacgaagattctgccaatccctaacataataaatggccgtgtagcacacggctctaaaaatctagcagttttttcttcaacgcatattcaaccaactccggccggctcttcaggttaagcttctccatgattttagccttatgcgcctcgacggtcttgacggatacatacagcttctcggcaatctccttgttcccaaagccttttgcaatcaacggcaatatttcaacctctcgctgggacaagccgttgaacagatcttgctcggccctttcgctgtctttttttatgaattcccggaccaaagaagtagccatttgaggatgaatataagtgccaccagaataaaccgttcgtatggccgataggagttcgtcatcaggcgcgtttttgagcacataccctgctgctccattcttgagtacatgaaacaagtaatcctcgtcatcatacatggtcaaaataataattttcgtatctggaaactcgctgctgattttgcctgtggcaatgagcccactttccccggggggcatgcttaaatccattagcagcacatctggacgatgccttgccaccattgcgtaggcttccaggccatcggctgcggtggctaccacctccatatccggctgatagttcaaaatcatagaaaacccgcttcgaacgacagcatgatcgtctgcaatgacaattttcatgcctccacctcccgtttctcctttatcttcggcagcgggatgcttagctgaacagtagtcccttcgcccacggcggagtggatcgtaaactgaccgcccaccagctcggtccgctcacgcattccatacaaaccgagtccagttccctttgcttcgttaatgaccatatcaaatcccacgccctcatctctaaccaccagttgaagttgaccgtgctcctcgcacagccgcacgtagacctcatcagtttctgcatacttcaaggcgttaagcacggcctcttgacatacacgataaacgaccgtctcaatttcgcttccatagcgagctgcggcaagctctgcggaaaacttcaccagcagtccgtaatttttctccatccacttaaaatgggagcgaaaggctgcttccagcccgagatcatctagcgaagaggggcgcagctccaccgctaaatggcggatgtcatcgagcagccgtgtcaaagattgctcggtatgctggagcttcttcagcacatcttccccgacatccatatatttgacaacacgcaggtcgacgagtgagcttaacagttcctgggctacgctgtcatgaagctcccgagaaatccgcttacgctcgtcctcctgtgctttaatgacatatttaagcatatgattgcgctgtagcatctcctgcgttttctgctgcttcgtcagatccagcaacatgagcacccgcacgccagcttcctcgtcaatcgtatggtagctcgcggcaaacggaacgacagccccatcctttgtcttaagaaacaattgaaaggatgaaaactctccttggggataatcgaggtagcaattggcacaagagatcagttcttgttcatccgtgtagcctttgcaagtttgacagaacgattcgtcagttccggcgcgaattcgcctaatgacttgcgggtcaataatctgctccgccgcgggattcatatcaatcacgttgccttcttcatcgatgaagatcatagcctccatgctattccggtacagcttgttcatcaattcgctcaagtgttccccggtcatcgttttcaaggctgtgacacctccctgatctgaaaagctccaaacgtcgagcctaagctttcttggaagctcgcaaacgatggttgatttaacacattctccttgcgaaagccgactaacagcacgccaacgacacgcgccccttcccatagcggcaacgccccgaggcttttcaactgttctgacacaataataggataattgaacaagtcccttgtgccgatatcgctgttcacattttggagcagtatcgcttttcctgttttaaaaacgatcccggcaatgcctttgcctgaatggagcacaatccgcttgtaccggtcattcatgtttccggacacatactgccacgttaatacaaaccgatcttcggccggctggacgagagctagagatacaaagtcaaacttccatctcttccggatgtcgtcaatctcctgttgataattgattgaagggagatccgccattgtcataactataactcctctggcgtagaaaagaaggctgctttagccttctcttagctacgttcatattttacggtgctttctataaaggatatatcgtctgccgatataattcaacggcacactccatacatggacaagtctagtaaacggccacaacgcaaaaatgagcaagccagcagtaatatgaattttaaatgacagcggcacgtctatcattaagcccgcgtccggccggaagagaaaaagctggcgaaaccagaccgacaccgtctcccggtaattgaagtccggctgcagagcattggtgacaagggtgctgtacatgcctaccgctacaataaacagcagcaggacatttacgatcatatccgaggcggagctgagctggcgcacatttttcatcgtaaatcgtcgaaaagtaagcaggaccatgccagcaagagttaaaaatccgaacgcgctgcctatatatacggctccgatatggtatagatgttcattcacaccgactgcctccatccaggactggggtatgcccagtcctgccacatggcccataatgaccgggatgatgcctaagtgaaacatcaggctgcctgcccttagtcgctttttctcaacaaactcgctcgacttcgccgtccagttaaactggtctgttcgataccggtagatatgtccgaccacaaaaacagagaaacatatataagggtaaatcacccacaaaaacggatccattatactcatgtgcctggagcctcctgtataacgcataccttaaacgtttcccgcagtcccttaatgagatgaaaataagggctgtctgctttttctaaagcatttagcaaatgataggttccatcctccattaccgccagcatcaaatccaggctgcttgcagcttgctgctcatggccctgccaaggggcggcgtacagaaattcacacatgagcggcaagtaatctgagagttcggtgccttcgatcgcaaggccaaacagctcatatgcttgtttgagccgtacgaggagcgctccccgctcccggctgtcctcatatttgtaaaaggtcatgtacaaggttgtgtctttttgaaaatcaaacgtctgcacatacatctcttcgatctgctcaaagctgtaattttgcatgagatgccagtatttctggagtgaaggatgggccgggtgtccggcagtcagcgcttccgtccacacatcaggatgaaaatcgaacttctctgggtacataagctggcgggcaaaaaaggcgaatcgtgacttctgctcatgtagcttctcaagatcaatcacgccaaatccccccgtagaaattttcttcatacatctctttgccgcttttgccaccaaagccctctgggccgcagcccgtgcaaccgagcccaaagccttcatccccttgggagcgatacacatccatgtacgcctctttatgcgaagtagggatgacaaaccgatcttcatatttggcaattgccagcaaacgatacatttctttcacctgagttgaagtgagccccacccgtgttaagcgacgttcgtcaaaggcagcgccagaggagacggcccgcatcatcgatctcatcatggccattttctgaagcgctccctttaccgtctcggtatccccggccgtaagcaagttcgctaaatactgaatcggcgtgcgcatctcctcgatcgcagggaatattaaatctgggttcccgatcgaatccttgccttcaaatagattcatgatcgggctgagcggcggtacataccagaccatcggcagcgtccggtactctggatgaagtggaaatgccagcttgtattcaattgccagcttatacacaggcgactgctgtgccgcttcgatccattcctcaggaagcccatctgcccgggcctgggcaataatggccggatcgttcgggtcaagaaacaaatcacactgagactggtacaaatcctgctcattcgctacggaagccgcttcttgtacacgatcggcgtcgtagagcagcacgccgagatagcggatccgtccagtacacgtttcggagcagacagtcggcaaaccggcttcgattcttggaaagcaaaatgtacatttctccgctttattcgttttccagttgaaatacacttttttgtaaggacagcctgtcatacagtaccgccagccccggcaagcttcctggtcaactagtacaattccatcctcatcgcgcttatacatcgcccctgacgggcaggaagcgacacagctcggattgaggcagtgttcgcacaaccgtggcaaatacatcataaacgtttgctcaaagttgaacttgatttcttcttcgatcttttcgatattcggatcgcgggggcctgttacgtggcctcccgcaagatcatcctcccaattgggtccccactctagatccatcgtgtccccggtcactgccgatttcggacgggctactggctgatgcttcttctccccagcgtttgtcaaatgttcatagttgtaagtccacggttcatagtaatccttcatttccggcatatcaggattgtgaaaaatgctgccaagggcgattttggacaacttgctgccagatttcagttccaacttgccgtttttaagtgtccagccccctttgtattgttcctgatcctcccagcgaaccgggtatccgatccccggttttgtctcgacattgttgaaccatatatactcggcccctggtcggttggtccacgtactcttgcaagtcacgctgcaagtatggcaaccaatgcatttatctaaattcatcaccatggccacttgcgctttaatcttcaagccaatccacctctttcattttgcgaacagccacgtacacatcccgttggtttccgatcggtccgtagtaattaaatccatagctcagttgggcatagcccccgactacttgtgtcggcttcacgtggatccgagtcggggcattgtgactaccgccgcggtttttcgtaatttcggagcctgggacgtaaatatgtttgtcttgggcatggtacataaacatcgtcccttttggcatccgatggctaacgacagctctggctgtgaccactccatttcggttgtatacctcgagccagtcgttgtcctgaatgtgatgagcagcagcgtcttcattgttcagccatactgtcggcccgccccggaatagtgtcagcatgtgcagattatcctgatacgtgctgtggatattccacttcccatgtggtgttaaataacgcagcacgagcgtttcgtcgctgccatccacctgcctgtcgcgaggcccaaataccatcggcggcaacgtcggtttgtacactggcagcgcttcgccgaattgcagaaaaatctcatgatcgatataaaaatgttgtctgccagtcaatgtcctaaaaggtaccaagcgttcaatattggtcgtaaatggggaataccttcttcccatcttattggatccggtaaacaccggtgttgggataacttcccgtggctgggccgtgatgctttggaacgtaatccgctccgctgaccgatccgctgaaatatctgcaagctggacgccggtatcctgttcgagcgcctcccaggcacgctgggatacacggccgttggtggctgatgatagcgtcaatatggtttcagccgcatgacgtgccgtatacaatttcggcagtccctgcttaatcgtgtcgtcctcatagatgccgttgatccgcttcagttcctcgtattcctcggccaccgggaagctgacgccgtgcgcccctaccttgccgttggccagtcctgggccaagcgaaatatatttgttataaatttgtgtatagtcccgttccacaatcgtcaaattcggcatcgttttgccaggcaccgcttcaatctcgcccttgcgccaatccttgacgacgccataaggctgggcaatttcactcgcagaatcatgggcgagcggcgtagcgaccaaatctttgtgtacgccggggaggtggtctttggccatttctgaaaaggtcttggcaagggttctgtaaatatcccagtctgagcgcgattcccacagaggatcaacggccggattaaacggatggacgaacggatgcatatcggttgaagagagatccgtcttctcgtaccaagttgctgcaggcaggacgatatcggcataaatcggcgttgcagtcatgcgaaaatcaagcgcaactagcaggtctagcttgccgactgcttcttcccgccagaccatctcctctggcttttgctcctcgttcggagaagagagcaaattatccgacgtgcctagcagatgtttcataaaatattcctgccccttagccgagctggaaattaggttagaccgccatacaaacatcgtgcgcggaaaattttccggtgcatcgggatcctcggccgcaaatgtggttttgccagagacgatttgctcataagcatgcttgacgatgtcctcgttgtttgtttttccttgctgcttcgcctcctctgcaaacgctagactgctcttgttgaactgaggataggacgggagccagccaagccttgcagccagaacgttgtaatcggcaggatgggtgtaccgagtttcgccaccagtaggcgatttcaacgattcggtgtccatctcctcatacttccattgatcggtggcaaagtagaagaaggaagtcgcgttttgttgccgcggtggcccctgccaatctttcgcaaacgctacagttgaccagccttcgattgggcggcatttttcttgaccgacataatgggcccacccgcctccattgacgccttgagaagcggtaaggataaccaagttcagaatggctctgtagattgtgtcgctgttgaaccagtgattgatcccagctcccataatgatcatggagcgtccacctgtatccaaagaattctgggcaaattcccgggcaatttgtacgacaacggaggctttcacaccggtgatgctctcctgccaagcaggcgtgtacttcgaggtttcatcctcatagccatcagcctcccactcgcttccgatgcgctggatgccgtactggctcagcattaagtcgtacacagttgctgccagacgtttcgttccatcggccaactggatcgttcggacgggaatcacccgtttaaatgtgccgctgcctgcgttatcaaagaacggaaaataaatcgtttgaaacgcccctccatggggttccaccgagagtgcaggcgatatcaccgaaccgtcctcgcgctccaaaatgaggttccactgtttcccctcttcccagcgctgtcccatcgtcccgttaggcaccaaaacttcttctgttgtttcatcaataagaactggcttccattccgcatgaggggacgtttccccgagatcacttgcccggaggaagcgccctgctttatagccgtcctcaaactcctctaacaaaattagaaaaggcatatctgtatactgcttcgcataatccaggaacatcggctcctgacgtttatgataatattcgttcaaaataacatgagtcattgcctgagcaatcgctgcatcagttccaggattcggcgccagccagttatcagcaaatttaacgttttcggcgtaatctggagcaacagaaactaccttggttcctttatagcgtacctcggtcatgaaatgggcatctggcgtgcgtgtcagcggtacattcgacccccacataataaggtagccggcgttataccagtcgctcgattctggcacatcggtttgctctccccaaatttgcggagaagcaggcggaagatcggcataccaatcataaaagctaagcatctcgcctcccagcagagaaataaagcgagagcctgaggcatagctgatcatcgacattgccggaatcggcgtgaatccggctatccggtctggaccgtatttgcgtatcgtatagattaactgggcggagattagctgtgtcgcatcctgccaggatacgcggacatggccgccctttcctcgtgcctgcttgtatgagttagccttctcgggatcctccacaatgcttgcccaagcggcgactggatcatcgtgctgcttaagggcctctttccagagccgccatagccgtccacgcatataaggatatttcacgcgcaacggactgtactcataccaggagaatgaggctcccctcggacagcctcgcggttcaaattcaggcatatccggcccgcaggaaggataatcaatctgctggttttcccacgtaatgatgccactcttcacaaacaccttccagctgcaggagccggtacagttaaccccatgggtggttctgaccaccttgtcatgggaccaccggtttcggtacatatcctcccattcccggctcttctcctcgagaatggaccaattgtccgaatagctttctacttttttaaagaatgtcaatcccttgtttcgtttcataggacgcttcaactccttgtgcttgaatgacgatgattggcggggaatcaatgcgtcgtccattcgtatacctttattatgaagaatccaccgcggctgctcctattagggaaacgcctatattgcttcgtgaactcccttgttttgcgggatgaaccgttctaacccaacaaaaaacgccgctcggatcttatcgatccgaacggcatttttcaacgattctatatttgattggtttttaagctttggtttccatcatatcactgtacagacattccggaataatatgttgttttctagatgaatatgatcatacgtatcttgttcaaggtaggcaaggcgctgatatacaagacgataagtaccgcaagcatcagccgcacggttccattgctcggcagtgcttgtcttgttttctaacggcctttctccacacagccttcgcctcaaacagcgattttgcttatagaagtgcttccccgtcatcaggcggcatcacttattttgcccgctgagcaacaagattggcgatattgacaatcacatggactgctttttccatattatctactgacacatattcatagcggccgtggtagttttctcctccagtaaaaatgtttggtgtaggcaaccctttataagaaagttgcgagccatcggtgccgccacgaatcggccctactttcgggtcaatgccaagcttctccatcgcctccaacgcaacctcgactatctccttctgtggctctattttttcacgcatattgtaatattggtcacgaagctcaatggatacttttccctttccatgcttttcttgcatttcccaggcaatggcctccatttttgctttcctatttgcaaattgctgacggtcaaaatcacgaataatataatggagttcagcaaaatcagcattgccttccattgaaagcaagtggtaaaagccttcatagccttccgtgaattctggcgcttcgttcgctggaagctgtgaatggtattcgatcgcccgtttgatcgcattcaccattttatttttggccgttcccggatgagtgctaacgccataaaagctgacttttgctgccgccgcgttgaaactctcatattggaattggcctaaaggtccgccatcaagcgtataagcaaaggcagcgccaaaagcatcaacatcaaaatgagccggtccccgtccaatttcctcatctggcgtaaaggcaacacgaatcttcccatgctctatttctggatgcttaatcaaataatccattgctgtcattatctcggcaatcccggctttgtcgtcggcgccaagcagcgtggttccgtctgtggtaatcaacgtatggccttcgtaccctgctaattccgggaattgcttaggcgagagcacgtagccatggccaagctcaatgtcaccgccgttgtactcgtgcacttgcggattaacgtttttgcctgtaaattccgttgccgtatcaagatgagcaagaaagccaatagtcgggacttccttattcgtattgctttccaatgtcgccatcacatagccattatcgtccatcgtcacttctgttaagccaagcgctttcaactcttctacaaggatgcggcctagttccaattgtccttctgttgtcggaacagtattgctcgcctctgttgattgtgtgtccactttggcatagcgagtaaagcggtcaatgatctcttgtttcatattttgcaatcccttcaccgatttggtttatttctttccattatagcaaaaaccgcagaagaaacagaaaaatgcactctacattattttctcgctaactggaaacagtcgcagtgacctctactcaagtattcaacgtacagatgatagaagcgagggataaatcgtttaaagctgaggaaaaatgaatttagcaaatgcctctcttctcattcatctatgaaagagtcaaaccgctttcatttatttccattgccaaattaggaaaacaactatataatctttgtaaataatttacctataaggagtgaaaatgatgagtgttttctttgaaaaagcacaacggttcggtaaatcgtttatgcttcccatcgccgtgttacctgccgctggtttactattaggcattggcggcgctttaagcaacccgaatacgctggttgcttatccgtttttggaccagccgtttttgcaaggcttgtttacgatcatgagctcagcaggaaacattgtctttgctaatcttccgcttttatttgcgatcggccttgcggtcggactagcacgggccgataaaggcaccgtcggccttgccgccgttatcggctactttgttatgaatgcgacgattaatgccatgctaacgattaccggcacgctcgcggaggactctcttgctgatgtcggccaagggatgagcgtaggcattcaaacactggaaacaggcgtttttggcggtgtactcgtcggaattatggcgtatgttctccataaacgttactataaaattgagctccctcgttttcttggtttctttggcggctcccgttttattccgattattacctctgtcgttgcgatggttcttggtgtcctattgttttatgtatggccctttattcaacaaggcattttctcgctcggttctttagtagaaatgaccggctatattggaacatttttatacggctttattctacgtttgttagggccatttggcttgcaccatattttttacatgccattttggacaacaagccttggcggctcgatgattgtcgatggcacacttgtcgaaggcacacagcgaattttcttcgcacagctcgctgatccaagcgtgactcaattctacgaaggcacttctcgctttatgtccgggcgttttattacgatgatgttcggtttgctcggtgcatgcttagccatttaccacacagcaaaacctaaaaacaaaaagatcgttgctggccttttactctcagcagggctcacttcctttttgacaggcattactgagccaattgagttctcattcctgttcattgctcctgctctttatgtcgtccatgccttttttgatggtctcgcctttatgctcgcccacatcttttcgattacaatcgggcagacattttctggcggcttcatcgattttatgttgttcggcgtgcttcaaggcaacgataaaaccaattgggtgtttgtcccgcttattggcattgtctggtttttcctttactatttcacgttccgctttatgattaggaaattcaattacaagacgccaggccgagaagacgaggaaatcactgcacaaactgtatctggcacagagagagccaccgccatcgtcgctgctctcggggctgcggcaaacattaaagatgttgatgcctgcgctacccgccttcgcgttagtgtccaagatggtgagaaagtcgataaagatcaattcaaagcaacaggcgccaaaggtgttattgttaacggcaatggcgtacaagtgatctacggaccggaagtgacggtcattcgtaatgaagttgatgaactgttaggagataaatgacatgcatgctgtgttaaaaaaaatgaaaaacaaactggtcgtttcctgccaagcattagaagaagaaccgcttcattcttcctttattatggggcgcatggctctcgccgctaaacaaggcggcgcttcaggaattcgcgccaattcgaaagaagacatacttgaaatcaaatcaacggtcgacttgcctgtcatcggaattgtgaagcgccattatccaggaagcgacgtttatattacggcgacaatgacggaagtggacgaattaatggaagccaacgtggacatgattgccatggatgcgaccaaacaaaaacgccctaagcaatcgctggcggaaatggtagcagcaatccgcaaccagtatccgtccgttgcccttatggcggacgtttctacgttggaagaagcaatcgaagcagaccgccttggctttgactgcatctcgacgacattagtcggctataccgcttataccgctggcgcgtcggcgtcagacaatgattttgctcttttaaaagagatggtccaagcggtgaaagcgccagtcatcgcagaaggaaaaatgaacactcctgcccttgccaaatgtgctcttaaagcaggcgcccacagcgttgttgtcggtggagcgattacccgccctcagcaaatcacaaagacgtttgtggaagccttgcagtaaaattcagttatagacaaaacgcctttgggaatgatctcaaaggcgttttgtttatagcagcggctactagatcttttttaattggctgagcgcgtgaagtgtttttcggcgcgcttttgctcgttcttcattttgggcgagtacaaggctgattaaatcaagcacgtggacgatggagagctgggcgttgagaaagccacgggcgtaaaaaggtttagggctgaaacttaatagcagcaagtctgccatttcgcttaatggcgtatgttcatggttcgtcaacaaaatgaccgttgccccattttctttggctaacgctaccgcttcctgaatatcaacggtatggccagaatttgaaatggcgagaaccacatcagccgctgtcaaaagcgaggcgttcatcaccattgtatgggaatcgatatggcagtcaacgcgcatccccatccgcattagccgaaacttcatttcctgaccagacaagcctgaactaccgattccataaatttcaatccggttcgcgttctcaagcaatgtagccgcttggacaatgtcgtcctgatttatcagttcccgacttccgccaataatcgctttgtaaatcgactccatttcagcgattagttctccgccctcttcttctgttcgaatgctgtctctcaccgacattttaaattcaacaaaattggcggctccgacttttcggcaaaaacgggtgattgtcgctacagaaacactgcattttgccgccaagtctttaatatggatattggcaagttcttctggcgcgctcatcacataatcagcaatacgtttctccgcagcgctgagcgcatgataattcacttggatttgttgcagcattggcaacatgagcgaaacctccctgccgttctttctctatcatacacgatttttcgtcgttttaccctttaagcgatatccgactttaactaacaaattaagacaaggctcaaaatagcgtacattcttgagggcattcgcaacatgaatcactatgaaaccattacacgccatccctgttaagttccttgatcatcgagcatgtttctacttgatagccggccttttgataaagagaaatagcacgcttatttgctccaaaaacatctaatttcaagtatgtatagccatgatccttggcccattgctccccttttgctaataaccttttgccaacattctttccctcatgctcactagcaaccacaagagcagccacatacccttgcttttcctctgtaaaataatgcatgtgttcgcgaagagcaatatacccgacaaccgcctcttcttctttggcgacatagatcgtaaacgatggatcggttaatgtttcatttagcaacgtttcttgttttcgtctgaatgatgtgaaatcattgacgccaaccacatccgtcctgttcaaacggacggctaatgcgacaatttgagctttatcattttccttcatctccctaataaccatcgtttcctcactcctatcttcaattataaaccatctcctactatccaatttttgaagttattttaaagtcaaatctcttaatcaatacctacttacgcgaacttatgttctcatatctttaaatatggtataataaaacaaggcaattgaataaggctttggagtggtcgttcgcccccttgcatgtttttgctaacgaaagggggtgaggccttgacagtatttgaaacgctagttgtcacgtttgcagcagcaaacctactcgttgccatactgtcgtataagaaagacaaataaccactcctaagcccgggaagctagagtggttattggaatcacttaggcgaacgcccctttagggcattcaattgccgctggcctcggtgttcgcgcaccaggccttttttatcctatgtctttgtatccttattataccggcgatttggcctaaacgcaaacggagcttatcaaaaaggcattgtagcggcatttgccgttttagactctccccctaagaaagaggttgatcggaagaccatccacccactttttacgaaaaacttcgattcgcgacttggttaatccagttcaagtctgcttctaaatgcagcaacatgcctgtaattaataagtacttgttttcgtcgccttcaagcaaaaacgttgtttttaatttcgttaactccatgacttctttaatcactaatgctttttgttgttccaacatgttcttttcttgggcaaattcgattttccgtgcacaactccatttaaagaaaaaatcatcttttgttgaatcgtacgttactggttccagcaaccatttttgtagctctttttcaccggcaggctccaacgcgaataacttccgttcctgctcatccgacccgggagaggaaacgagttgatcccgaattaagcgatcaagggtcgtataaatttggcccggattgatctttcctttaatccccaatagcgaatcgagttctattttcaattcgtatccatggcgatgttgctggaacaataatgttaaaatcccatatttaactgacaaacgatcacccttctttaagagatgactgtatatccattttacttgcactgtggctagatatccaggctgcaccaaggcttaacccaattccggcaattagagctaagaccatattgccaacaggcaactgaaaagacataaagccttccattatttcagattgactggtgacaaaaattaataatacaccaatagccatccctatcaccacgcctgctaaaccaatcaagaatccttcagccatgatcatttttcgaacttgttgcttggtgaagccaagtgcacgcatcgtcccaatctccgttatccgttccattgtattcattaccaacgtatttgcagtgccaatactcgctaatccgatcatcataaacaacataacagaaatcagttcattcatgccggacaccgctgacgtcgttgagcgaatttcatcttctaccgtttccacttttgaaagctgcccaccaaactcagaccatatctgttcgcgaatcgtattatacgcttcctgctcggcagtaagcaacaaatcaaagctattggtccagccaaattcgtgctgaaggtggctctcgtccataaaagcgacataacctgaatagtgggacgtctgcacgaccccaactacttcaaaagattgtcggccgtttggcgtgttcatttgtatatgcttgcctatctgtcctccccattctttaaaagcgcgctccccaagcaaaatagatgggttctggtttaactgtttaaggagctccttctcatcaggatcggcaaataaggaagggccctcttcgctagcagcaagaacagaaaattgcctgctttctccactcatcgtttcccacgttatcggcgttgcttctgtaaacggctcaaccgctgtaatctcttcataagaaaggagtttggcacgatcttcctctgtccatggcgcctcagacgttagtttcaaatctccaccatacgagtttcgaatgtcgttctcaaatccttctggagcagactttatgactgcgccaagcaataatataaccgacatgccgatggcaagaatcgccgctgtattggcattgcgatttaactgctggcttatatggttggtagccatgatccctggatactgaaaaagctgtttcaatagcggtctaaggagtttgtttaaccctaataacagcaaaggaaacaacagaatcacaccagctacaatagcagcgtaagcggcaggatggtcgaaaaatcctaaacaaagaagcccagcgccaactacggcccgttgccacaaccgtctcgacgaatgtttcgtttcagtttccatttttaacgtcagtaaaatcgacgtcttgccagcatggtaaatcgggaaaagagaaaaagcaatcggaaacagcacaccaatgatgatggccatcaatgccggcagctgccagtttagcgtatagaccatatcaaattcaaaaacactaagaagaacttccatgaatacatccccgagccataccccgagggggacgcctattgccgtgcctaacaacgacaaaagcaatatttccataagcacgagcttagaaacagcacgctgtgtgtaccctaagcttttcataatcgcaaattcttttcttctttcaatgacgctcgtataaatcacattaaatacaataaagccactaataaacatcgacaagcctgcgactaaataaaagaatgtataaagcccgccaatatcgttgctttgcaagtcatcagccactacaggttgaataaatacttgagtatctcgaaattgttgttgcaatgactgaaacaaatccgtgccgtcgccttgcacttgaaaacgcatataggaaatggcatggtcgtttcctgtccactctcttaataaatcaagtggcgccataatccgaaaactagacgactctgcgatttcccaattattaggacttgctagcagttgcgtatactcaacgatcgcagagactcgcgcctcgcccatattagctaggcgaaccgtatcgccaacccctacccctaaaagattggcgacgcttttgggtacgaccaatccttgattgtctagttccccttctatcacaggcaattttagcaaaggactgttttggtcactaactcctgtaattcttacagcccgttcatttaaagagcggtcgccctcaagctcaaaaaaagcgtgcttgtcgagggcttctaatgtatgggtgacaatcggatcattttggatgggcgcaatcatttcttcaggatacgtatgttcatcgcttaatacccaataatcagcattgccgacatacatttgctcgtagtaatcaaagacgtcatttgttgttttatcagctactagcatagctgttacaaaagacgtccctagtataatagcgagcaacgtcaagcaaaacctttttttgttgtcggtaatattacgccaagaaattcgccaggtatttagcatagtcacgatcctcccttgaaataacttggtcgatgaccccatccctaaacagaatgatgcggtctgcaaaaccagcagcaaaaatgtcatgtgttaccatcacgaccgtttgcttgtcctttcggtggaacgttgacaacaaagcaagtatctcttctgcttttgctcggtctaaatttccagtcggttcatctgccaacaaaacagtcggattatgaacaagtgctctcgctatcgctacgcgttgctgttgacccccactgagcaagttcacccgtttgcggttcaacccctttaatcctactgaatcaatcaagtcattgaccgcttggctatgttcactcgtccacttaccgtccgcatggaggggaaatgcgacattctcttctaccgttaacgtaggcaacaattgataattttggaacacaaaccctaacttttgtcgccgaaagatcgttctctctttttccttcatctgatgcaacggttttccgtctatctctatttccccagcagtaggcacatccagtccacctagcagttgaagcaacgtgcttttcccagaaccactcggccccatgatggccacgaattcgccttcctttatagtaaaatcaaccccttttaacacttgtgtggcctcttgcccttgcataaattctttcgtcaggttgctcactttaatcattctgtcccctcctattaacaatctaactcattatatactaagtatatataaaaaagaagaaaaaaatgtggaattcattttttttgcgtaataaaccacaataagatgtccaaattgttatatactaagtaactacccagagtagtagagcgggattggtgtaaacaagaagttcgctagtcagccaattggttaaaaggtgacacggttatcctccgacgttatttttaaacatcggccatttctcataaaaaagagccccttgaaaagcatttttcgcttttcaagggactcataaccatacttacatgtcgttttctaaacgcgacagtttcactgtctcattcgggtcagggacgggaagtttttgcgggctcaaatcttctttttccgcggcggcattagggttcactttgttttcatgctggtcttcctcaaactcaaacaatcttggcgtagatcctgtcgttggcttaagttctcccttgcttagtcgatgctcgttttcgctttgcccgtacatactaatagaggctgagaatacaagcaacgtactaacaaaagcaatcgctgatccaaagatcaaaatgttcttttttttcagcatctatatcaccctcctatacaaattgtaccatatacaagggtaaaatataacaattgctttacaatactgatcgtgcaaccttaattaattggtctaggtttaaatctgaggactcaagtctataccctagaccacctttatcccaacctagttgttgaaccgatccatcccaccccttttcagcatcttcaaaactctgattgtctttaatcaagactcttccataagtccaaaaaacgttttgctctgttagttcgtttttttcggatatatttagcacattttcagcaagtacctgagcacctgaaaaatgaccctgtctaaataaaaaagtatttttcccgttaatataagtcaaaataaccgtctcattcttattaaattgttcatccttactatccgggataaagtgttgtacgtgcaaaaggttatatccattaggtataaaagtaggatttaggatgttaaaattagatgctgtatttgcctcttcaacagttttaaaaatccttcgttttgtctctataatttgtacctttgcttttttattcattttagagttcctccttttgataacagtttaaatgtaacaagatccacaactacctgtatgagcactacaatttcgacaattactcgtatagcaagtaggactaattacataccgacattgctgtatattcccacatgggcgacattgatatgtgtagcactgagacataccattacatcgttcattacatttacaaaaacgatccctactaacgcaagcaaaaattccacaactactcattttttacctccaaatataaatttagttatttttatccgaatgaccgtgctcttttacttaaccgataaaaccaaaatacatatcactttagtcaaataactttaactttcatttacctccctcctttcacttcaaaaagagagtaaataaacgaaaaaacaaaatagcaattatttttttattgcatctctaagtttatttatcatcactgccgaagtctcagcaagttcagcataaagctctttttccttcccattacagcaatttaaacatttcgaacaaattgacaatgttttatgcacagaaagtaaacactttataagagcatcttctctattcatcagtttctctcctttcttccttattcttaggatcactcaaaaactctatcccgtataaactaaaaagacagttcaacacaattatcaaaatccaatggtaaaaacaattaaaaaccctaaacggactcacttttttgaaaaaaatcgatttgctgtatgccttaactgtgtatgaaacagatcttgttgagccacttgaggaaacgggcttatatcaacatctaggcgatatacaaacagagcaaaccgtatctttcaaaaaggcgaggctttttttaaattgattaaataaatcgagaatgatcatccgctttgtctctacgagcattaacctaaacttgctaattcctaacatcgatattgttttctctcctatttttaatattaagacaggaaaaataggaaagggcaagaaaacataagacaaaggtcaattcgcagtttgataaaaagatcaattggtagaaaagtccaactttaaagagcttaaaggggtggtagggtgaactattcaagaaaaatggtggaattgcttcttacacagaaaaatataaagctccacgaactatttagttcagaaagcatgattaaagaaatagcacaacaatcttacttccgttttgaagagtggatgttattgatcaaatatatatgtccccaagacacaatttcaattatgaatgtttatgcccctaacgtgaaccaagttgatgatatacgtgatgcttttgaatatgcgactatttatgaaaaacttgaccttttagagaaacttcttgcactccataaagaaagagagtctttacgagaatggattgttgtttatgaaattacttttcaggtactctctggttcgatgtctttgaaacaagcattggaacaagttaaatatcaatatagccgtttgcaacatccaataacgcgaatgcgcctacaattaatcgaactaaccacaaactttaaattaggcaatgttagaaatgccctactttttgccgaccaactgcaacgtgatcttatgaaattgaatccgtgctacacaaaaagcgtaacggcctcaaggcttcttttattaatggggctgggaaaactatacggtgaaggaaatgcatcaactgcagaggagtatttacaagcagttcactcaattaaagttgcaccagaacctgtacgcgcatctagctaccatgcattgtcaatcttgtattcaaaaaaaaataaagagcactgttgggcctacagaaaaaaatcgattatccatgctaaacaagcagagttacgggattatattaaagccttggaatatcacaaagttccatttataaaaaatttgcacggcgaaatgttcgaattaaataatacgattccaatagaagaacatattcatcaatatgttatccgaaataacaacgaaacagcattaaaccttattcacaaacttgaaaacgagggaaaacaaagccctttcatgctttattacaaaggcaaagctactaaagacgcaaacctattaatggaagcaataatgagtttctccacaaacgggagagcagacgttgtcccttttattaaagaagatattgctgctttataggcagtagtggatatgttgatgacgagcaggaagactaacagataaggttgttgtctttgttggcgtttgcgacagcctgctatattttctgtttttcttcatgcgggaagttgtctctcttcaccattgagatttgccaagaaaaaacaaacctctatgggcgtgtactcgtgtttttctcattgcaaacaaaagctactttttcccaactgatttctattgtgttcttttttataatgggcttagaagcttaataacagccaagtctaacaccatttttctttttaggaggatggctaatgaaaaagactattggtacgttgattgtggtgactatgatggcaatgggggtttcatctaaagtcgctgcatcagaaaattccgccgaacaggaagggtggagactcgtctggagcgatgaatttgacggcaatactcttgaccagagcaagtggcgatacgacattggaaatggctatccaaatttgcctggctggggaaacgaagaattgcaatactacagcgatcacccgaaaaatgtacgggtggagaatggcgagttaattattgaagctcatcaagaaactgtttccgaccaatatggtacctatggctatacatcaggaaaagtgttaacagatggccgctttagccaaacatacgggcggttcgaggcaagaatgcgtttgcctgccggacaagggttttggcccgccttttggatgatgccacaacatgaccgttatggcggttgggccgcatcaggcgaaattgatattatggaaaacgcaggcgctacgccacataaagtcggaggagcgattcattacggcggcccttggcccgacaatcgattttctgcgggtgattactatttcccaaatgggacaaacgctactgactaccatgagtacgcggtcgagtgggagccaggtgaaattcgctggtacgtcgatgggaacttgtacctgacactaaacgattggtacacagttggaggcccttaccccgcaccctttgaccaagagttctatttgattctcaaccttgctgttggcggttggtatggcggcaacccagatggctctaccccattcccttccaccatggccgttgattatgttcgcgtgtatcagcgatagtattaaagctaggtggcttaaatgagttgcctggctttcacttttgtttatggctaatataagatgtccattgatttcgatttatttattcaatgatccccttttcctttaataaattttcaaagttgtcttcttctatatttccattatgtacatacaaataaaggctttccgttccgcctacctcttctccatttgagagtacaagaggtacgcttcgcatttctccaaagcttttagtaatttcttcatatacttttatccaatttccttcccctacttctttttgaggaaattcaatcgtagggaaagctttagaaacagccttccacctttccatcatctctttcgtccgttctgtaggcgttagcgtaatatcatcaacattttctctttttccataatcactataatcaatttccatacgaagaaagtccgctgtttgagcataaacctttaatgcattttcttctatccgcattcgctgttgttgcttttcctcatgctgaaaataccaaaaaaataaggaacctacacttataactaccattgtcacaaggactatccatttcgtctttgtcattcaaaacgctccatacgattccttctttagtttctcacgttctccccaagtctaaaagacggacgcctcgttacgtgcaactccatatttgagagaccatttgtcacttttccctattcttagttgatggtcgattctctcttgcccagcttggtgcctgcccatttcgttcgagagattcctattacaaactcctttaacgctattcctatgtaatatcggactctcaagacaacgcttgttttaacttaagtttcctatcattcttttatgttaaaagaagtagtccgcatagatcgcttcaacgatttccgcatcgttgattttccattccccgtcttcttttgtcatttcgatatcgatataatttattttttcaggtggttgtactttttgaggatggagccgaaactggaccgtccctttttgtcgattgacttttgtatggaggacaccgtattgaggattagccaccacggcatattcggttgtttgtatgaaaaatatattcatgcttggggattgaccagcttctattaattcatttatttgattttgatagtcttcggtaaaccacgcaccgtactccctttcaattacttcctgtattggttcactactgccgtgctctcgaagtatttccccatcctcatggaatgccagtagcgtttctaatgcctctaaactttctctttccgcggctttcgtattcacaatgcagcctgtagcaaacaaagcgatcgcagctaataaaataggcaaccgtattcgtctcacttgatcactcttttccacttgtagcgtaaagtatgaactttcatatcaatttgccttcatcatgcttattcaataatttctttttcctttaataacgtttcaaaatttccttctcgtatcaccccgtcacgaacatatatatatatactttctgttccccctagatcttccccttctggtaattctttagatagagcaactactgtatcgtgcatggtcttttgacttccaatgagctttcgatacaccttaatccaatctcctttatcgacttcatcccaaggaaattcgattgaaggaaacgctttagacacagctttccacctttccatcgtatgttctgtttctactgtaggcgtcagcacaatatctttcacgtttccgctctgttcatagtcactataatcaatttccatgcgaaggatgtctgcagtagtagcatacattttcaattcactttcctctgcatgcatttgctgtcgttctttttcttgatattgtaaataccaaaaaactaagactcctacaccgacaaccattattgtcacgagaactctccatttccattttgtcatcttaacgctccgtccccataactaattttcctcattatatcgtttgttctgttcaactaatttcgaaaccgtgacatcttccccaatttggttgcgagtgatatattcctgtaaagcaggataaattgccctattagaatcctcaccgcttcccctcaaacttccactgaccgtttgccattcttgatttcgaatcactggaaactagcactttgtcgtttatccgtgctggcaaaggctattctctaattgctcacgcttttcaattgatttatgcactagaatgaaaaacgaccgttcaagttttggattgctgatgaaggaggaaaaaggaagccatctagcctccctaagttgtgtttcttattaaaatttgttcttccctcggttatttccacaaacatcttttcctcatgtgacactagcaatcctcactactctaacctcctctgatctggcgcctcaattccacttcaggaaattcacggaagtagtcattgtgtacagattctttatataaatataattattaatcctagaaagatcattaaaagaaaaagtccgcatagatcgcttcgacgatttctgcatcattgattttccattctctgtcctcttttgtcatctcgatatcgataaaattgaggttttcatgaagcgggtttactttttgaggaactaatcggtatttgactgttccctcttggcgtttgaccttcgagtaaaggacacaatactcattattagcagacaacccagcctcagtttttcttaaaaaaaataaattcatgctaatagactggcctgactcaatgattttactcactttgccttgataatctttagtgaaccatctctcatattctttttcgaccataccttggatcggttcttcattaccttcttctagcaatatttcacccgtttcaaaagctgataaaaatccttctaatacttctagactctctttttctgctgctttcgcatttaaaatacaacctgtagtaaataaaagtaccattccaaataaaataggcaaccgtattcgtctcacttgatcactcatttccttattactttaaaaggctagcgtcatctgatctcaaaaaatacaacgtagcaaacgtcccaaaggctttgttgctgaaattcatttgataacccctttctcctttaacatttcttcaaaattcccttcttgtataactccattctgaacatatatatttaaactctctacaccacccatagtttctccttcaggcaactcggaagctagagacacaactacttctctcatttctccttcactcccaagaagcctttgacatacttgaacccaatctccttcttctacttcttcctgtggaaatttaattgatgggaacgcttgagatacagcttcccatctttctatggttctttccgtctctatggtaggcgttaatactatatcttttacagttctagtcttctcgtaattacggtaatcaatttccatacgaagtgtgtcggcggtacgtatatacagtcttaactccctttcctcatctcgaagctgcacacgttccttctcctgataattccaataccagagggataaggcccctacaaagacgatactcaatataataaggattttccattttctttttttcatttcattgctccgcttctattccttactttcatgacgctgtttatttctttttactagatcccccaccgtatcatcctcccgaatgtctccacttataatatactcttgcaaacttggataaatggtcgtcgttgaatcatcactgcttcctctcaagttttgactgaccgttggccagtcttgattttgaatcgcttcttctggatactgaatgtttggatcaattcattctcgctcgtgtctacatctaagtacaaagtccccgctgtgtaactatatttgttatgcaaagctcgattagcctctgtttttccttgttggtctttgttccaaaaatagaaggcaatgcctacgcagagggcgaggacaacggcaatagcgattacaattatccagattcggtcaaactgactccatttcatcaggtagatggtttctgcttgctttttctgatagacctctaacattgaaaaaggaaaccatatgacctcccttagttgcgtcttattaaattctcttttcccccggttattgacacaaacatctcttcctcatgtgacactaacaatcccccactactcccaccttctccgatctggtccttcaatcccattttcttcaagaaattcacggaagtagtcattgtatacggaaccatataaaagatagtcattaatggccatggaattggtagtctcactcccccccctttttgtaatctccttcgatgcatcttctgcatcaaagcgattggaagcaaacgtattataaacattgagccagtcttctagctcaatagcttcttccggataatcaatcatcgggatcacttcagtgatcgcttcccaacgttgtaaaagctcataggtaaggtccgttggcattaactcaatatcattgggatctcctgtttgtcatactcactcgtgtttgcctccatatgcaaagtcccccctgcatagttatattcctcaagcaaggcatactttgcttccgcgtccttttcttgttgggctttgtaccaaaaatagaagggaatgcctacacataggatgataaagacaactaaagccattagaattttccattttcggttcattactttggctccgtttcgtcaggtaaatgtttttttgcttgaggtcctactaattcaacagttgttttcccatctggtaaattgccatcgatgatatatttatatagatcatcgttgattttgttaattttccctgtgcctttaaaagttcttcaataatcttgggccaatcatgatgatcaattgcctcttttggataagggatttcagcgttaatagcattcacttcttcccacctctcaaggatatcaaaagtatcttcagtcggttgaaaagaaacattcagttcctcacgctctcccacaatccttaaaggcggacgcttcgccacatgcagctccatattaagagcaccagctgtcactttcgcttcccctattgttagttgatggttgatctcctcttgaccaatttgatacctgcttactcgttcgagagattcctacggcaaactcctttaacgctattcctatgtaatatcggattcactcaagacaatgcttgttgatgacttaagtttcctatcattcttttatgttaaaagaagtagtccgcatagatcgcttcaaccatttccgcatcattgattttccattctccatcttcttttgtcatttcgatgtcgacaaaatggaggttttcttgaagacgattggttgtttgagggtgcagtcgatactgaacggttccctcttgtcgattgacttttgtaaaaagcacaccatattgactatttgcagttaatccatcttccgttcctttcaaaaagaataactttaatgagttgccggattcaatgctttcactaactttagctttgtactctttggtaaaccaatcattaaattcgtgatcaacaatctctagaatcggtttatcactacctttttctcgtagcattttttcatgttcatgagctgaaaaaaatgcttctaaagcttctaaactattacgttctgcagcttttgcatttacaatacaacctgttgcaaataaagcgatcactgcgactgaaaaaaacaacagtattcgtctcacttgaaccccctcttccccctctacatgtacgatgattgatccttggtaaaacgataaatcataaaataccttaccgttttcttttaccaaccccgatagctactcgataatccctttttcctttaatagcttttcaaagttatcttcccttattgctccgtcgcgaacgtataaataaagtctttccctcattatatcttctccttcagggaggttggctgaaagagcgcgtattacttctcccatctcaccttcactttcaattaacttttgatatacctcaacccaatcctcttcttcgacttcttcctcaggaaacttaattgatgggaatgcttcagaaacggctttccacctttccatcgtgtgctctgtttctctggtaggcgtcaacttaatatcctccacattccctgattgctcatatcctctgtaatcaatttccatgaaaagtgtatccgctgcacgaacatattttcctagctctctttcctcgtttttcaactgtgccttctcttgctcctgatgagaccaataccaaactaacagcgtgcccacactgataacagctagtgctccaaggagtatccttcttaatctcatcactactcccgctccattctaattcttatattcctcatgttattgtttgttctcttccactaattcttccactgtcgcattttctcccatttgattacaaataatatagtcttgcaaattaatgatcactgcttcctctcaaactttcgctcaccgttgcccagtcttgattttgaatcgcttcttctgggtactcgatagttggatcaattgcttatacttctttccagcgctccagtatgctgtaagtaatatcagttgtcgtacctctacgacatactgcgagaggtttagcattagctctgtttcaagaggaaaaggaagccatctagcctccctaagttgtgtttcttattaaaattcgttcttccctccacacatctattcctcatgtagcactaacaatccccactactcgaaccttctctgatctggcgcctcaattccactttcttcaagaaattcacggaaatcatcattgtatacagatcctacatcgatgtaatcattaatgaccattgaattcgcggatccatactcttctcctttagtaatttcttctgacgcctcttccatatcaaagcgatttttggcaaacgtattataaacatcgagccaatcttcctgctcaatagcttcctccggataatcaatcgttgaaatcacttcagcaattgcttcccaccgttgtaaaagctcatatgtaaggtccgtcggtgttaattcaatgtcatgggcatcgcctgtacgaacatactcacttgtatccacgtctaaatgcaagccacctgctgtatagctgtatgtgttatgcaaagctcgattagcctctgctttttcttgttggtctttgttccaaaaatagaaggcaatgcctacgcagagggcgaggacaacagcaatagcgattacaattatccagattcggttcattaaactgactccatttcatcaggtagatggtttctgcttgctttttctgatagacctctaacattaaaaaaggaagccatctgacctccctaagttttcgtttccttttaaaacacacttttgcccctcgttattggcataaacatctctcccgtctagacgctaacaatccctcactattctagtctctttggtctggtccctctattccattatcttcgagaaattcgcggaaatagtcattatatacgattcctttataaaggtaatcaagaatagccattgaatcggtagtagcttcatcctcatttcctttagtaatctctttggacacatccattgcttcaaatcgattatctgctaacgtactaaacactttaagccagtcttctttttctaccgcttccttcggataatcaatcgttggaatcacttcggtgattgattcccaacgttgtaaaagatcatacgtcagatcagttggcgttaattcaatgtcatgaaaatcgcccgtttgttcatactcgctcgtgtctacatccaaatgcaaacttcctgccgtgtagccgtatttgttacgcaagtcacgatcagccgcttctttttcttgttgggctttgttccaataatggaacgcgatacttatacaaatggcaaggacaacgacaatagccaataggatcagccgttttcggttcattacttccgctccattttgtcaggtaaatgtttttctgcgtaaggtcctgctagttccttgtttgtttcccatctgataaattgccatggatgaatgtgtttgttgatctcaccttaacaaaagataattaaaagaaataatccgcatagatcgcttcaacgatttccgcatcattgattttccattttccgtcttctttagacatttcgatatcaacaaagtcgaggttttcatgaagcgggttgactttttgtgggtgtagacggtaccgaatagtcccatcttttcggtcgactttcgtataaagtacaccatatttattataagcgactaatttagacccagattcttgcataaaaaaaatagttctccaagtcctcttaccggacctaatcacttcgttcactttggcttgataatcttttgtaaaccactctgcatattcttcttcaacaacctcttctcgtccttgaccattataattgtctaaaagcacttcaccatgttcatgtgctgccaaaaaagcttctaaggcttccaaactttctttttccgcggctttcgcatttacaatgcagcctgtgacaagtgtagctaacaccgccaataaaataagcaaccgtattcgtctcacttagatcactctctttctctaccactgctaaggatcggtgctattgacttttccaaagaggtacacttttaaaagttggactttccttatttaataatctctttctcttttaatagcttttcaaaattcccttctcttataacaccattacgaacaaatatatataggctttccagcccccctaagtcttccccttcaggtaggttggctgaaagagtttcgattacctctaacatttctccctcactttcaagaaatttaagatatacctcaacccaatcctcttcttcaatttgtttctgaggaaattgaattgttggaaatgcttcagacacagcctcccatctttctattatggtatctgtctgttccgtaggatttaacgaaatatcatccacattccctccctgttcgtacccgcggtagtcgatttccatatatagcaaagcagcagtgttagtatacatccccaattctttttcctcactccgtaactgctcccgctcattttcttgataaacccagtaccagattaagcctccccctatgcagaggacaagcagtgtcataagtattttccattttgtcaatgtcaccgctccatttctttagtaaccttgcttattccgctccactaattgctcaactgtatcactttcatgaattgtattattcgtaatatactcttgtaaacttgtgttgatcattgtacttgattcctcccctccccctcttaaactttcgctcactattggccagtcttgatttcgaatcgcttcttctgggtactcgatagttggatcaattgcttttacttctttccatcgttctaatatttcatatgttacttcggttggttggatttctacgaaaaattgtttttccccgtaaacatttcgctcggaaataagcaattccattcctaaattgcctgctgttagctttgcttctttaattgttaactgattatcaagttcttgctttcccgtttcatgtctggttactgtatcaactatgttgactaccccaccaacccggttgctaagttctccaagtattagttgctggatttcttccccaataaagttttctgtatagtgggcacgggcttccatgagttctttatattcttctgcttctaaactatttactgcattcccaccaatataatagttcacggctgattcgttgattcggactaaaaccgggaactccatattgagaaattcttcccttgtcatgtcaccagcatattgcgagatgtttagcatcagctctgttccaaaggtatgaatatgcggattgagattgcgttcgtacgataagtgattgactttagcaagaaaaggaatatcgacgcctccttttttagcttctttttctagctccccaattgctgctttgtattggcttaacaacgacaaatatgctcttattttttgagcatctccaattttttctttactgtcaaaatgatctctcggcccattattccccaagtacaaatacgcttgtaacatcgctatctcttgatcaagggcttctttggatactaacactttatcatttaaacgatcctgcaaagcctctacaccttcgttgctgatcatgctttcgatttctttaatttcggcgatggtggcctcgtctaacacctcactctgtatatactggtacagcaactctcgctcagcatagttgagggcttcgccgctttccattttgatgagcaggctggtaatcaggctcttgtcttcgaagatcgcttgttttagctgttcgacgtttaaggtggcgaggttttcgccattttggccgagtccgtttgtgaaggcgttcagggcggagtcgagggcactcaagccggtttgtgcggcggaaaagtcggcttttgcggttgagtcggctgtgaccatgccgtcccaaaagcggtggatggcttggaggtctccgtaaatgtcgccttcttctacgactgcaatgtgtggaggggaaaagcctcgtttcgccaatagttcttgcgcgcctattcggacggagtttgcacgaaatacgctatccatgtaatctgccataatctgtttgtattcctcaattaaccggtttagttcctcgcggtcggcgcggtggttgcccacaggatcaccttcctcctattgattttatagagcacggagcttgctttgtgtactggcgatgttggctttgacagagtggatcgacgcttcgttggtggcgattaggcgctctagttgaagggtcgctgcctgttgttgtttaatctcgtgttggatttgccgggcttgatgctctagttgttcgatcatttcttggatgttttgtcctgtcgtttgttgggtcatccgccgggattgtattcgctcttggatcttttctaatgctcggctttccagttggcccgttttgacgaattggactgtggccatgggagatgcttcgccgctagtcaattcctcgagtcgcgcttgttcaaatgcgatgttttgttggtattgccgaagttctgctaattcttgttctagtttttggatggccatcatgccgctgtcgtagcgttgctggtaatcggcattttgccggtatagcgattgtaactgggaatggttcgctgacaagtgcgcgtttagctttgtcagttctgcctgtttgtccatagtaccccccttatcggcttattggtcggctagataatggtcgactttcgtttcaaatttgctgctcatttcttcgtctgtctcgtttatctgctcgatggcttggtcgagcgttgctagcattgcttccatcaacgcctgcgtttgtacaagcgcctttctcaagtctgcgcttgcgaggtcgtgctcggctttggcgtctcctttccaatcggacacagcgtcgattaaggcgtctagtttgctaatcgcttcttccatctgttcgcctgggattagtctcgctttctcgattaagctttgtacggcagcggggtcgactttgatttcaagtgacatgtgttcacctcaccctgtaaatggttcaacttcattgattttttgttggaatgtcgcagcggctgcttgtaattcttctagcgacagggaaaagcgggttaggagatattctttgattagcgcgctgctttccgcaaaagcgtcagcggactcgcctgtaaagatgccctcacttttcatcagttcaaaaggtgtaaaaaaatcagtcaatatgctggtgacttcttctaacagctctgcatacgtgtcgtttaacttgtttaattgctcgtcgcttatttcaattttgtctgggccgaccaacatcgtctcttcacctctattctcgcttgcatgtccgtattttctgttttgacaaaaacatggttattcgttcatttgcgcggttttaggaataatataaatcaataaaacagaaacgagcacggtggccacagctgctaatatccatggcagcacgtttactttttcttctgcctgcaccacttggcggaccaactctttttcctctgtaaacagcccggcgcttgcggcgaggttttcctcgcggtttgcatcagcactactcgcaaacaggctatcttgcagttccgcgtatgtttcttccaatggctgagtaaatgtgagtattttttgttcttcaggcactctaatttctctttgctctgcttctggtttgtactcgcggagctctaacagcacttcccgctctttgtaaacaccaggttccacacgttcttcttcggcaaagcttggagttgccaaggacaagagcagcgtgacgcatgctcctgccccggcaatgatggccttacatttcataatcgtcatcctcttcttttcggctgttcacgaccaaatggcgaatgattggcaaagcaatcgttgctgctgcaatgagagccaatgggatcatgcctgcgagaaacgcattttgcgggctcgcctgaatggaaatgtatagctccgcaattgggttattggtacggaagtttggcatcgccatatcaagaagcgggcttgtaaagaatagaatgaacgcgacactaagcagccacccgccccacgggcccgccataaaggcaacgcggataaggccagctgtcgccaaaatcaagaggacggtaatgatcgtccattgaatcgattggctctcgctcattgtgtaaatcgtcagtccataaatgctgatgactaaaccaacaatgatcgataaaatgctaaacaacgcgatattaacggcaattggcacagagctatagtggtgtgtcaaaaagccgatcagcaagctcgacaatagtacgatcacaagaacaatgattggcggcgtcattctttctgcaggtcctgttacttgctcgccgcttatatcaacagggctagaaagatggttatagacatagtcattatggtgcccgtctgacagcgcgttgccaagaatcgtgtgaatgtcctcgtaaacaagttcagttgtttggacattgtccgaccatctcgagtttaaatcatcggatttggcttggactgccgtcacattgttgtgtaggtcttctgtttgggcaataatatcgtcttggcggttgctaagagattcaactgctgctcctaattgttggacttcgcctaatgacatttgttgattggtcacgaccatttgcccatttaacccttcgacaggcgctggttctgtttcaatcgctccatagctttcagataagttcgctccaatagcgttgcccgtttctgcaatcgccgccacttcttcgcgaatcgcttgttgttcttcagcaattgcttgttctaactcgttcagcacgttgtttgcatcggcgataaattgattaaattctgcttctgcttcctcaaccgattgttgggcttcttccaattgcgttcgcttgcccataaacgaatcgactgattgccgcgcctcgtcaattttttcctgaacctcgcggacacggttgtcttcatcgacaatttgcttaatccggtcttgattcaaatagccttgctgactgtatgcccaatccaatttggccagctcgccgtaataggtaagcagttcacgtacatttgttgactgaatcggactgttaataacggacggagatgcgcctattcggttgaaaacggcttgttcttgcttgtgcacttcctcgatgactggatcaatcacttgcgcttccagtttctccacatacttttccaaacgcgttgcataacgttccagtttttcgacgtattcgaggaacgcctcggtcacttctcgatggtcatcgattttccactgtgccacttctaacgttggttccatactttcaagaagctccattgcttcttcccaaacgatttgcagttcttcaggcgtaaaagtgacaagttgggcatggtacggcgtaaaggagagcgcttcttctctatcttcttcttgttcgccttctcctgctggtggctcttgctcagtatccccgtcgccatctccaccgccattgccgtctccgtcgctatcttcaggaggctctgttgaatctggcgggggttcctctccaccgttcccatcatcatcgccatctcctggttctggtggcgtaggctgttcattatcgtcgccgtcaccgccatcgccatctccgtccccatcgcctggatcaggttctggtggcggcggctctggaaattcaatttcttcagggtttaacttgccgactagcttttcaatttcggcaatcgtttcttctgcgtctttcagtaggtcttcgtcaatcggctctagtgtttcctctggttgttcagggcgagggatgttctgtggtggccgctcgtcctttgacaaatggcggcgcacatttaacgtttgccggaactgcgcttctgcccgttctccttgcgtcgcatttgcatattttccaatcagttcagcctgtgcatttggcagccgatcgacggctagatcttgggcagcatatacttggtttatttcgctattaaacccattcatttcgccattaaacttataggcgccaattgcccaatcatcaaacaaagagaaaactttgtcgccttcattggaaagctgtggcgcaaacgcatgctggccttcctggacgttgccgcttcctgcctgcaatgcctgttggtagtcagccactgcttggttgacaagctccccattttgagcgttcgcctgcaccatcatctccgtttgctcattatggtaagccatgtaggtatcaatcgcattggtaagttcatcaaagccagcttgcgcttcttctaaactagtacgagagctttccgacaaattgacagtgtccgaagaagtagcgaataactggtcaagacgacctcgctgcgtttcaatttcatctgccaattcttgtgagcttggcgagtaaaatgaatacatttcatttaggaagtcaacttctttttgtagcacttcatcaaagttgtttcgaactcggtcgacttcctcagacacatagcgccaatattgggtgctaatttgctggttcatttttagttgggcactctctagctctttttgcacccgttcttggttttcagcatttaagttattataaatttcgtattgtacactggctcggttcggcattgaatcttgaaaggacataatgttctcggaaaaagaggaatcaatataaacgatcgcatcatattcctgattcgctagtcctgcttgggcagaggccctgctagccactacccattcgtattccgagtcatcttgcaatgttggcacaatatcatttcctaaaataaggggatcattctcctcatattggtaccctttgtcctcattgacaatcacgatcttgccagacgcttttttttcttcacgcatcggttctttcccgatgtactgaaaaaaggcaaacggtacggcgatgatgattgccacaagcaccaatagttttaacatatgttttttctgcaattaaaccacctcgcttgttctttcatttatggagcttccggtattttgattttcgtctcgattccattgacgacatagtagccaaaacctggggcaatctcttcttcatttcgcgtgaacgaaagattgacaagggtttggtctgactttttcatgacgatgatatagtggcgcaccaacttcaattctgcagtaagaggatcgaagcctttcgtaaattctacggaattgccgcacacaatcagacgaaagcctaagtggctcgaatttttcattagcttcgccaacttatcttgaatggctgcatcaaccgtttgttggaagcggatcaggctgtcgattaataacagcactggggcaaaagctggaaccgtttctccattgtttaacgcgtccatataagcttgttcccgcacagccattttttcttcaacagctgacacccagtctttaatctgttctttttggtctatataggaaataagcttttgtccgacaaaagcagacagtttgcggtctgtgccgtcaaacagcccaatttcgtcaacttcctgttgcaaatagtagtttaataggactttggcaacgtttgtctttcctttccgcggctggccgacaactaacaaatgaggctctgacttcgtttgcaggaatacaggcttgaccgtatcttcgtcaagggcaaagggaatgctgtcgcctggatcgccaacacgcgtttggaaagaagccagcgatagctgtgtaggcagcatcgcaattttttccgggagcttggcgtcttgataacgctggcctaaatcggcaatcgtatttcttgtggctgccatcatttcctggtcatcttcaccggcttctggcaaatacatttgcgcaaaataatggctgtctttcgctaaaatggcgcggccaggtatcggttcgatttcgtacttgctgcggccgagcagcgtgataacatcgtttcggtcgttcataaagtggacgatctttgttttcattgtattcatgagtggctgacgcaaagcatttgcccgcgtcgctgttaggcttacgtaaattcctagagactggccatcacgggcaaattggataaaggttgattccaactgctcgtattcttccttgattaaatcaaagttgtcaatgaacataaacagaacaggcaatggctctgttgctgtttggttatacatcgtcaaactattgacttcttgagccaggaaccgttcgcggcgatcgtccatctccgcttttagcaaggcaatggccttttcgattttgcgcttttcatcgattttaaaataatcggctgtatgaggaagttgcctaaacggcaacaacgcgccattcccaaaatcaaaaatgtaaaagtgaaggtcttctgggctaaacgcctttgcaaactggagcatcaacgccataagcgttgtcgattttccgtaaccgccagagccaaatacagcaatattgccgtcttttagccattcataatgaacattgaattgcctttgttcctctggctcatcagcaagcgccaacggaaacatgccagcctctgtatctgtttgcacaggagggagccattcttcaagagggtcaagccatgggcttgaagctttttgaatgcatagacgttcagttgtcgcttcaatctctttaacaacagcttcaatttcagagatgctcttttgttttttcccagtagcagcttggacgttggaaatgggcactaagcctgcatcagtgactaatgccacatcttcctcgccttcatgggtttcgcgcaaatacggcgcaccgctccatgcggattggaacaattcatatagttcattattgccgacttgcaaataggcgcgccctgttaccgtcaaattggcggcatcgggatttttcagaatttctttagaatctagagcgtcttgcacttttaatgcgactcggaagcgggcgttactccaaatttggttgtcgataattccgcctggcttttgtgtggcaagaatgaggtggacgccaaggctacgtccgatccgcgctgcacttacgagttctttaataaattcaggttcctcgtttttcaattccgcaaattcatcagatatgataaacagatgtggcatcggttccaatacctgcttctgtttatacaactccatataatcatcgatatggttaactaagttttggtcaaacagccgctgccgcttgcgcagttcgcttttgatcgacgccaacgcccgcatactaaagttcttgctgtcgttgatgttggtaatggtgccgagcaaatggggaatatttttaaacggctgtgccatccccccgcctttgtagtcaatgagaagaaaagcaacttcatggggatggtaatggacggctaacgataaaatatacgtttgcagaaattcactttttcccgaacctgttgtccctgcaagcaaaccatggggcccatgcgccttttcatggatgttcagctcaagaagttcatcctttgctttaaatccgacgggcacagcaagcgactcggcgctgtttgtcgtttgccaccgttgttcaatagcaagttcttttgtatgctggacgccaaacatttcgagaaaagacgccatctccggtatagaacggctcatgcctcgttggtggttcaatgatgccagcaagcgggcatacttttcatttgttgttgcatcctgagggtcaaaggtaaagcgtttatgctccgctttccgttcccggatgacaatctcgccttctttttggttaacaaccttgacgatcgtatggacatactccgttaaattttcttgtgcatcggtgagaaaaataaccgacatgccaagaactttatccgggccttccaaatactccatgatggcatggtcgcttatcaaactgcgattggcgactaaaaagacaaagtgagggatgaaacgctttggcttgtcttggctttgttccaactcccgctcccgcaccatttcataaatcgatgtcaatagttggtctcgtgtccgctcattgtaaataaaccctttcgcgtacatgtgcggcaattgaaaatgagggagccatttcatccattcccaatttgcatactgctcttcgctgaaaacagcaacgaaacgaaggtcatggtagctttgaaaaaaggcaagttgcccaaccatttgagcgacttcccgttgtaccgtcttcagctggccgacatagccaatggaaccgctcgctaagctaaggctaaggggcgcatcattaatatgagaataatgctcttttaacttttcgccttcttctagcagctcgtcacgatctcgattcgctaaatcgccacctggatcggcaatctgaaaacttatcgggatcgacgatttcccaacacggacatgcataaaatcatcgtcaccaactgttttctcccagatacggccattcaagttcgctgccatatatttattttcctcaaacgacggaaaatggtaatcaagtacatgccgttgtttgtcagccatttcctggagttcgacgcgcttttccttcaagtagcgtgtataaacacgttgccgtttttcctctttttgcttgcggattttccgctcgcgaaaatagttgacggtcgaagtaatcagcgttacggtgaacatggtggccgaaataatgataaaaatgccccgaggaatgagcaatgcgacaattcccatgacaatgagcatcgctaacggcggcaatacgatgagccagagggcacgatgattatcgtccaactcctggcctggaatggagaaagtcacccggtcttttggctcttcataaatgatccgcggcgtccgcctgtactcagggtatttttttttgctttcggaagtaggaaccgctatgcgtgcgagtcgcgtttgcaaaggatcgcttgattcaattgccaataagtcgccttctttaatgacaagcgctgtatagccaagcaatagcacatcgccattctttaatcgttgcttgtttgtaagggctttgccatttacaaacgcatggctgtgcttttctggataagcaaaccaattgccgcctttctttatgagcgtacaagaggcagaaggcttctcactaggcaggacaatgtcggctgattcctcaggcccaatggaaaggaacgtttcttcaccaataaaatacatccgttcgcttgccgcttcgtttttatatacaaatgtgacggcagcgtcattttctttatactggaatgattcaccagccgctaaaatttgctcacctgctccttctatgtcaagcacacattgcttttggtcacttgccattttcgcgcggattttagcatgcagaggcggaacgagcaaatcaacgtcctcgcttgcgcctaacaaacgctctgcttggcttaagtcaagttgctgtacatacgaatcataaaatacccacagtctatccattgtcccatctcctacgtgcgcacttactcatctgcgttctcctcttcctcgttttgctcaggctcgtcctcttgctcgttttcttcgccatcttccgaacgctcttcgctttgctctggctcttcttcagtcgcattgtcatcagcagcggcgtcctcttcttcctccgcttcccgttcttgttgctctcgcatataacggtcaatatccgcttgaatatcgttaagcaattcttcccgctcatctcctgacaagctgagatcctggcgaatcgcatcacgccactttaaattcgcatacatttccaattccccgtcctgcaactggcgagcaatttcattggcttcctcatgttcaccacggccaatcgcaatccaatattggaaataaagctcttcagcttgaagcgtcaacgtattttgcacatttgcagtctgatccatgttcaagtcttcattagcaacatacgattgagccaactgatactggacaacgcggggcatttggctcgggttatatggttctaatgccgtaatgacatcgcttggcttgctgttaatataggcctcattgctggcaataaaggcgtcgtgacgcggatgaaggaaaaaaagcgcatagacggtaaaaacaatagccggtataagcagtcctgtaacagcaaaaaacaagcttttttgcaagcgccatttttgctttggcaccatatgcatttggctagcgcgtcgctcttcttcttggatccatgtctctacacagctcaaaagcgcttcaattgtatcagcctctagcaatttttttgctcttgccgacaatttcattgtgtccgtaaaattcatatattcaacaaagcggtactcgccatcaagcaacacaagcaacgttgtcttaagctcagtgaacagcttctcttcgttcttttcatatggtgggaggctttctttgatgccataatggataaagtgaacatcaagcccctctgttactaataaattctccggacagacaattaaatgcagcctggaactgtgatgctcggcaaccgcgcgaataagtgagtggccgatgatttgttttgcgtaatcgccctttttccgaaacttgctaaaaggctgcattgtctcttgcggatgaatggtaatgacaagctcatcttctgcttcagcaattgtacgctcgagcagcggatcttgttgttttaacaactccgcttctagcgaattcgacagctttatttctgcggtttgaaatgttaatgtatatgtattcgattctgcgtccctgtaaaaagctgcacccgtttgttcttctaaataaaatcgctttttctccattgcatgtccgaccccttcaaccaatgctataagatttccaagcggtctccatttgttacaccacgttcagcaagtatttggctgccgtagacatgagtttctttgttttggacacggatccagctcccatcacgccgtggaacttccagcttctcaatgccccaaacgagatcaatgactttttttgctgtatattgatcagagaggcgcaaatcaaaccgtttccctgagtatcggttcatgtcaactgttacagtgatgtacatcaaatgccaccctttcataaggaaggacgcaattgtaaggaattgcgtcccaagatgtttctattcgccgccaattaaccgcgaatgttgcccgcgatttgttggtctgtttcttcaagtgtccgtccgctgttgcgaagctgttcagatacttcaccaagcaaatcgcccatgcggacaaaggatggcttcaattcatcgtactgttgaatgaacgcctctgaagcttgaccatcccacattccttgaagctggtctctgtaaccatctaatctgctcacgagatcatggatctcaccacttgagcggttgtaatcatcagctttttggtaaagttcttctggggtaacgcgaataagtccagacatagtaaatccctccttaatggtttatattatcatggtagccagtggagattttaccagtcaaccatgatcttacaaatttatagaaaacagttatatagtactgatattatcaattttcacacaccgaagtcgagaccttcttcctagaacaacttggctagttttttgcctccctaatactaatttcaaaatcatatgataaaagataataatcatttttatttaggcataaacgcactaaaaaacccagcctatttgaactgggtttcacagaaaatcctcttttcccgcctaaacgactgtttatccttttacaccagtaagggcaatcccctcaataatttgccgttgagcaaaaaagtaaacaatcagcacagggacgacggaaatggttgcacctgccatcatgagcggccagttagtgacgtaaagtcctttaaatgttgctagcagcaacggaacagtgaacaatgtcgtatcgcttaaaaacacgagcggctggataaagttattccaaatgccgataaacgaaaaaatcgcgaatgctgctagtgccggtttaatgagtggcagcatgattttcgcataaatatacaatgggttggcgccgtccatcacggccgcctcttccatttcttttggaattcccatcataaattgccttaacaaaaacacgccaaacgcattaaatagtgcattcggaacaatgattgacagatgcgtgttgacccagccgatgttatccataatgatgtaaagcggaatgagcgttacttgcatgggcaccatcatcgttgccaaaaaggcgatgaacaacaccttggaacctggaaatttcaatttggcgaaagcgtaggctgccattgaacaagtcaagacttggctgacgacaacaatggttgagatataaaagctgttaaaataggcacgtccaaaaggcatcgcttgcaaggaatcggtgaagttgctccagacaaacggatcaggaatccaaacaggcggaacggcaaaaatttgttcaaacgattttaagctgctaagcgccatccaaataaacggacctgccataacgatcgagccgatgactaaagtcacatgtaacaagatttgtgagatgcggatccggccgcgttttttttgcttaactggccctgggttaagaactggattatctgccgccgtcttcataatgcacccactttcttgatacagagaattggattaaggtaaaaatgaggatgatcgcaaacaaaatcattgctgaggctgtacttggcccaaatgccgtccgtgtaaacgccatgtcaaaaatatggtacacaagcgtataactcgcttttccagggccgccttgagtcatgacataagcttggtcaaacacttggaaggaggcaatcacaatcatgatcgccacgaaaaaagtcgttggcgatagtagcggaaacgtaatatgccggaatttttgccacggtgtcgccccatcaatgtcagccgcttcataataactgcgggaaattccttgcaaccctgctaaaaagatgaccatgtttgtcccaagcccccaccaaatgctaagggcagcaatcgaaggcaacacaagcttttgatcagtcagccagtttggtccgtcaatgccggccatggcgaggagctgattgatcaagccaatatccccatttaagagccacatccaaataaccccgatcgatacagaactagttacaacaggcatgaaaaacagcattcgataaaaatctttgcctttgactttatttaatgcaagcgcagcgcctagggcggcaataatgcctccaggaatgacgaacaacgaataaagcgtcgtatttcgcatagctgtcctaaaaacagggtcttgaaattgttgaatataattatctaagccgacaaacgtccgctccccaaaaccgtcccaactcatgaaactgagggcaaatgcgaatatgagtggaagcaatgaaaacacaatcatgcccagcagctggggagcgatgaacgcataaccccaccatttttcccgttttgtatacatctccagctcctccttaatcgatgcgcaagaattcaaggggcacaaggccccttggctgttactcttctaacgcagctttcgcaatttccgtcgcttctttaagagcgtcttcaggcgtcttgtcgccaagtagcatcaattcgtatacatcatttatgtccctatggagccccggcgatgtatattcaagactgacgacacgccctgcttcgcgggcatcgagtaagtactggccatgctctggtttatcttggtttaataccacttcatcaattccagtaacggaagggacagcgttgccttcaccatcaaggcgtgtttcctggccttcctgggaagtgtaaaacgagatgaacttcattgcctcttcaacgtgctcactttttgagtttgcagccatatacgcagtggcaatattcgccgtttctaacgtattttctgtattcgaaggccatggaatataatcaaaatcaatgcttgtttccaaaaacattggtgtcagccaacgtccggcccctacaaagccaacttggttcgacataaacatcgcatccatgccctgtccttctggcagtgtccctgcaaaaataaagttgccttcctctaccatacgatggacaaactcgaacgcttccagcacttttggatcagcgtcgcctatgacttcgtcatctgtcgcaaattcgccaccatttgtccaaatccagtttagcaagtgtggatgtccaccctcttggacaaatccgtatttgccatggtcacgcaattttgcagtgacttcttcaaacgcttcccagttccaattgccttcttcgtaatattcttgcggcgactttgcgccagcttcttcaagcaatgttttattgtagtacattaaatacggattacaatcaacaggcagtccgtatatcgtttcgtctttccgtgacgctccccaaatgtcatcggtaaactcatctgctttcacataagaatcttctgtctccaaaaagtcggacagcggttcaatcgttccgttctcaattaacgttgagatatcctctgctccaacgtagaaaatatcaggcgcttgccctccttggaggcgtgttgtcaatgtttgaaagtaattgtcattcggaataccagtgagcgtgacttcgatctcgtcttgcatgtcattaaaggcatcgactgcacgattgtacacttttaactcagccggattgccccatgccgaaaatgtcagttctacttttccatcagcgcctcccccgcctgaagtattaccactacagccgatgagcaaaccagtcgcaagtgcaacagacagagatgagcatataacctttttcattgaaaagcctcctttttcactttagagtaaacgtttacataattaattaagaacgaccaattttctgacgcgttcttctatacatctgcgaaagttggtatataataagtatacaatgttagcgctttcttttggctagtaacatttttgcgaaagagggtaatattttgcggtatagaccataataaggatgtatgaggaggctcccaaatgaataaacaacaaccatttacaagagggtcccattcttttactttccatttattccctgagactggcttgctcaatttatggaacgtcggttgggaagtgcaaaccgacacaagttactactgggacgggaacaaacgcgctaaagataatgacagcatcattttccaatatacaattgctggttcaggcgtgctggaaatcggcaaggagcgttacaccgttggccaacatcaggcgtttattgtatctgtaccaagtgaccatcgctactactaccctgaaaatgcgaaagaaccgtgggaattcatttacatttctttgcaaggggcatctgtgcaagacatttggcaacggctgatccaaaagtcagggccgattgtttcactgccgccaaattcgccgcttatccgctccctatattcgatttatgcggacacaaaagcggacgggctgcgcgatccttatttggccgcaacgcaagggtaccaatttttaattgaatgttttcgggccatggcagaagagcggccgcaaaatgagccctatcattaccagcgtgccctcgcttatatcgaagcccattatcatgaacaaatttgcctagataacattgcagaagaagtaggcgtttcccgttatacactgacacgtttatttaaaaagcaattgcacacaacaccaatatcctatgtgacagacttgcgcatgcgcaaagcttgttcgcttcttcttcatacaaaccggacaatcaaacaaattgctgcagatgtcggctatccagacgacaattatttccacaaagtattcagacgttacaccggttcaagtgcaacccaattccggcgcaacggcgatttatcgcagttatatgcaagaaaaatcgtcaaataaaaaaacagaggctgccaaagatcgtacaataacgtctttggcagcctttgtaagttctcctaatgaaacgactttcttcattaaatatcgcaacgttttctcagtctccgttgtccagcccatgtgcaaatgcggttgttgcttttacccatggccgtccatttgcccactcgaccgtaagaggcagccccaacgcctcacttattaggctagctgtcaatacttcttctttcctgcccgcagcaaggactctcccctttttcaggagcaatacatggctgatggacggaagaatttcttctggatagtgagtcacatacagcaacgttggcgcttgttttcttgtcaacatccgttctacttcagcgagcaactgctcccgcgcagacaaatcaagcccgcttgttgcttcatccagaatcagcaattctggctcattgattaacgccctcgccataaaagctttcttgcgttccccttgcgaaagctggcttagaggcgagaaagcaacatgttctaaccccattgagcgtgctagcgctaacgccctttccccatctgcttttgtgatcgcttcgtgaacaccaatcgaggcatgaacaccactgacaatcacatctgcacatggcatcccttcatgcatttggtaacgctggtcaagagaagcactgacccagccaaccctcttccgcaactcatggatattgacagagccaaaaacagaccctaataccgatatccttccagcagatgcccattcataccctgtaatcagctttaataaagaggtttttcctgatccatttgcgcctaatatcgcccattgctccccaggccttacttgccatgaaatgtcctgtagaataggttttttcgctttttgaaacgagacattttctaaatcgataaccatgtttctctccccacctcttgtccttttcccctttggaaccactttgcaaaaatgccgattttgccgcaacagctcaccttgcagcaggcaattccacgacttcccctaaggccataccgaaagttcgacacgatcatcgggctagtggccattagcacgattatacaacaaaaaagacaaatgtttcagaacaaggaaaaacctctttctagcgggagaagagaaggagaccagaataactctcggcctttggtgagtccacatttaaaacgggcctccttcgcatccttatttgaatcagtttaagtatggtcggtctgcgagaccgtgaaaaatcgccaagatcctgtcgctaatgaatattacgttttctgaaattgccgcccctcacttctgcaacgtcatatacagtcacaaacgcatcttcgtcaatttcttgaataatttctttcattttactttcttccaagcggttaatgacgcaagtgatttccctaaatttttctttcgtataactgccatatacttcattgtacgtggcacttcggcctaagcggtcacgtatcgtctcccccattaattcaggttgggttgtaatgattttaaaggttttagacccacttaaaccaacctcaacgacgtgaatcactttagaggcgataaaataagcaataccggaaagaatggcgccttgcaaaccaaatacagttgaaacaaaaataaatacaaacaaatttaagaaaaggattagatcgcttgtcccaaacggtaattttcgggaaagcagcacagccagcatatcaatcccatccaatgccccaccattgcgcaatgccagtcccatcccaaaaccgaggacaataccgcccacaacggtaaccaacaacgtatccccttcaataatcgtgggaatatggtgcataagactggtgctaaccgctaatgaagcgatcccgataatcgaataaatggcaaaacttttgcctatttgtttataacctaaccaaataaaagggatattgatgaccgcaattaaaacacctaacggcaatccaaataactgtgaacctacgatgcttaggccagtgacccccccatcagaaacgttgttcgggattaagaccgcttctaacccgtatgcggcaataaacccaccaagcacgatggccattccccgcaaaatcagtttaagttttttcgacttatgatgttttatcgtgctcatatgtaacctctttccactattttttctccactttcgataaaatgacgttttctgacctggttttataaaaaagggataaacttaaagaacccttcattgaagttatggtattttttatatcaaaccaagcaaaaaagttaaagcaatatgtactttttgttataattttattacggcaaggaaccaatccttagctattttaatttaaaaaagagggatagactatggcaaaagtagcaattgtaactggttctgcaggcggcttaggtaaagggattgcggaaagattgtgtaaagatgaatttagcgttgttctccatgatattaatgaatcactattaaatgaaactgtctcagagttcggtaaaaaagggtataacgtgattggcgtaaaaggagacgttgctaaacgagaggaccaattcaatttggtaaaagaagctgtaaatacatttggtcgtttagatgtctttgtaaacaacgctggtattgatgcggtatctccatttttagaaattacggaagaccaactcaacaaattattcagcattaatgtaaatggtgtggtttttggcactcaagcagcggcagaacaatttataaaccaaaaatcaaaagggaaaatcatcaatgcttgtagcatagctggacatgaatcttttgaaatgcttggaacctattctgcaacaaagcatgcggttaaatctttcactcattcagctgctaaggaattagccaaacatcaaattactgttaatgcttattgtcccggcatagctaaaacgaaaatgtgggatcgaattgatgaagaaatggtgaagtatagcgacgatctaaaaccaggtgaagcatttgaacaatactcctcacaaatcgccttgaaacgataccaaacaccggaagacgtagcaaacttagtttctttccttgcatccgatgaagctgattatattacaggccaagcaatactaacggatggcggcctggtttatagataagaaccaactgaaaggcctgcggaaatgagcccccaggcctttcagtttttcatccagctgtcatgaagcgctcttcttattcccctttttttttcacttatagtaagatagctatgaaagttgaggaggagtttccatgttgacaatcggaattgacttaggaacaaccaatagtttagtagcctactgggatcatgatcagcctcgccttattcctaatgttttaggagaataccttactccttctgtcgtaagtgtagatgaaaatggcgaggtcttaatagggcaaattgcaaaggaacgcctcttaacccacccgcatttaaccgcttcgatctttaagcggttcatgggtacagataaaaagtatacgttaggcgctcacactttcacccctgaagaactttcatcgtttatcatccgagtattaaaagcagatgcggaatcctatttccaggagaaaatcacaaacgccgtgatcagcgtccccgcttatttcaatgatgcccaacgaaaagcaaccaaacgagcggctgaacttgccgggctaacagtggagcggcttatcagtgaaccgacagctgctgcacttgcttacggactaaaccaagaaaaaccggaaacgaaatttttggtgtttgatctaggcggtggaacatttgacgtatcgatacttgaattattcgaagggattattgaagttaaatcgattgccggtgataactatcttggtggcgaggactttaccaatctattaatcacgtattttatcgatacccatcaattagataaaagtgcgctaaatgcaaaaacaatgtcgcttctctatacgcaggctgaacgatgcaaacttgccctctgcgagtcatcctctagttcgatgagcgttacgattgatggcaagacatatgaaacgacgcttcgcaaggaggactttgaaaaactttcgaatcaactgctcttgcggctgcgctacccgattgaacgggcattgcgtgacgctgatttattgccaagcgacatggacgctgtcatcttaattggaggggcaacacgcatgccgcttattaaatcagtcgtctccaaaatgtttggccggatgccttatacacatatacaccctgaccaaaccgttgctttaggaaccgctattcaagttgctttaaaagaaagagataaaacgttggaagaagtgattttaacggatgtatgcccctatacccttggaacacacgttgtggaagatttcgggaatggcaaaacagaaagtggctatttctttccgattattgaacgaaatacgccaatcccggttagccgggtagagcaattgtatacggtccaagacaatcaaaaagtgcttaacgtcgaggtttatcaaggggaaagcaggaaagtcgccaataatatcaaactgggagaactctctatccaagtacctccagctcccgccgggacacaagccattgatgtccggtatacatacgatatcaacggcattcttgaggttgaagtggtcagtaaagcgactggagcgaaaaaaagagtcgtcattgagcaaaatgctggagacctttctaaggaagagattgaagccagattaaaagaactagaaaatattaaaattcatccgagagatcggacagaaaataggttgctgctcgctaaaggagaacggctatatgaagaaatgcttggagaggaacgagataaagtagccttctttttacgggaatttgaacgggtattgctgactcagaatgaaaaagaaatcaaaaaagcagcaacaatattcaatgagcagttggaaacgattgaaaggtggatgtactctcgatgactgcttgggaaacgttagaaatcgaaccaacggataatctaacagctattaaaaaagcctatgcgaaagggttaaaaaaacatcatccggaagaagatcctgaaggctatcagcagcttagggaagcctatgattttgccctgaaacaggctaagcaagggattgtacatacagcgacaaagacggctgaacctttacaagactgggcattggatgagaaggcagtgattccagaacacccagtagacgaatttatcaaaaaggttcagaacctctatgatgattttttcgcacgtcttgagattgataactgggaaacgttactgcaggcagacattatttggaacgtgcaacattcggaacagcttcaagatgagttaattgattttttacaggagcatccttatttaccctcctccgtttggcagcttcttgaacaaacattccattggtctgaacaaaaggaacaattgcaagaacgctatggggaagaaacgacatcctttttgatcgaaaatatagcccattatcaacaattaggctatgattgtttccaaaaagaagtcgatatagattatgagcgctaccttcaattacgggcggatgcacaagcttatttacgtaatgatcaattagaagccgccaaagcagcaattgaccgggccttccaattgtttgcccgtgaccctgacttatggcatttaaagggagtctactatttacgaaacaacgattaccgggctgctttgcacatgttccaggaaaagctggcattatctccagcagacccagatggattgctttatagcgctcagctgcattttcacttcaaagactttcaaagtgtcattgccgactgtgaccaacttcttgcctaccacgagcatcacgttgagggattatttttaaagattaaaggccatttagaattaaacgatgaagtaacagcccatcagtggattgagaaggcaattgaattacatcctgatcggccggagttttttccatatcgatcaagagtgctcaatgaaaaaacaagaaatgagcaaattgaactcccggaaccgacgtccaaaaagaaaagacgcttgaataatatgctcttttatttatttatggttctacggagagcatggatatacgtgttcgtttttcttattatgcttatcccgcccatcccttttcactatactgcgctttttctaatcccgatcctttgggaatttgggagagtggcattggtattccttaagccggcagggatgttcacaaaaataaagaaaagacggcaagctctttatttccgctgtctttccgcagcttgcatcgaaagtgattttcttaatcattattttactgtatacgattttacctatgttagagatcgcctgatcgggaaaaagtttttgcaaaaagtgttagaaaaatgggaggtttccagtgccgccgagttaaaacaaaggattcaatggttaatggacgttgggacccgccgggaattcgattactatctcgatcagctgacgcctttatcagaagaagcacggacccggttcgtccaatccttaacgaaggatgaccctgactatccgaaattctttatagcgaatcggggaattcatacgttaacagaagcaggagttgcagcagtagactgggcttggagcatttacttgtgtcgcgtcggcagacgactaggctggttatcaaaaacagaagcaaatgagataatgttaaaggctgcccaacaatcgcaacaggcctatttaaattggaatgaatatttcacagcctttcatttgggcagttatttcaatgccgatgatagtgaacatgatcaatatgcgaaacatggcctttccatcatatttaccttacttatccaaggtaattctccgttattaaagctcgactggaagaatgaggagcttgtccataaataaaggaagaaacatgcaagcgccttgcattgctgtatgggaccgtgccactgtcatcatttacgcggtcctatactttggagagatcattaagttcgttattgactttatcaacacaattaagcctgtcaactttgttgacaggctcactaaaatgatttcccctctacttccccgttaattccggcaagaaacttgtaccaaattcgggcgtttgtacgcctgtaaagtcacttagtgtcgccgcaatatcggccatcgtgtctcgaatacctaaacatactggctgaacttgttttccatatacgagtataggggtgtgctccctcgtatgttgggagtggccgcaagtcgggtcatttccatggtcggctgtaacgataagtaggtcgtgttctgccagtgtcggcaaaaactcagccaaaaaatgatcgaccgtttcaagcacttctttataccatgacggatcttctttatgaccggccaagtcagtttcttggacattcacaaggaaaacagcatcttcttccgcttcattgtacatttttttgtatattgaaagcaattcaggcgtatggacgacagggtttgcaaagccttgcgcctgaataacatccgctgttttgccaattcgataaactggctttcctgcttgttcggccaaataggcaaattgcttttcaaatgtcacgccataacctaaatggagcacttgatacccttcgccgtatacacctgttttaggcgcattaatgccccactggcctggtttcccttcttctgccgcggctacaatgtctgtcagcggcacagactcgtttccaaatacaatcacacggcttgtatcaacatgctttctgactacagcagccatctttgttgccgcttcaaaggaaattcgggttaaatcagcagtaatattaatgatattgccgagtgccgactctaaattgtctcctacgacgacagcgccgtcaactagcaaaatcggcttgccttcgattagttcttctacatggtacccatttgcgattaaaccgtcggcgatttgctgcccaacttctttcatgaggcgcttagctggttttcctggcttcgaccccattagttcttggtggcccataaatgtatccgctccgtgatgggcaagtttgcttttgccataagcggcaatggcttcgccttcattgttaacgatttttcctaagcccattttcatgagcgtaggcaaatttagtccgacggtttcctgtagatgggcgtatgtggaggcgtggatgtcttctggtttggtttcacggcaatctgccattgcgccaacaccaaagccatccaacacgagcaacgttgcttttcccatatagctacatcccccttttttgctgatggacgataaccggcttgccgtttgccacacctctgacaaaggcaacgtgggaacgggtcacaaacacttgtgaacggtaagcatatacaaccgtatcacctgtctgcattccctgttcacgcttcaatgcaccataataatcaatattgccaggtgaaacgagatcgacttccgctttattgaaaatcgtcttaggtgaatcaccgtaaaacgcataagccatatttgagcgtgggtaaaatcccccagcaatcgtataagcatgggtttggtcctggtgagaaatttcagagacatacaccatagccggcagctcagctaaatcctcgcggtaggcatgcaacggcgttgtaccagtaagggcatggcctggctctgcgtgtgttgcgccaagttgtttaagcattgggattgtatttacactcgtggcgcttggcgtattcacatgcttcacttccactccagcttgttggagaagaccgacggctttgacaatcgtttgcgcattgcttgcataatggtagctattgtctccagcggtatacgctaaaacgggaaagctcgtcacaccgattaagcgaattcctgttaatgccgttaactctttgattgctgcaggcaattcttccaataaaaagccgccatattggcctggaaaaacgcaatctcctttgctgataacacggacaataacgtcttgtactactcctgcttgtacagcggcttcatttaattgtttagcccgttcaagtgagaagagcgtgacgacttccggtttcatgtctgttaatacaaaaggccattggtttttgccaggttggaccaaatgccctaagttgccgatcgcacagccgccgtcctttagttgaattgcttcatcgatatcgacagcaacagctttgtgaatgccacttttctcaatgtgtttgccgacaaagccgcttctgccgatctgcttcgtcatgtaatacagcgtcatgccatattcttccgctgtcttcgcaagaatggcggcatttcgttcaagcgcatcgagatcgattaaatgggtattaggcgcaagagctccgctttgatgaaggcagacggctgcttccaccaacttcgggttacgcttagcgatcatgctagtaaacatctcttgcattcatcctttctgtgcttctttcacagccaagtgtaagatgcgcagaacagtgcttgcacttgatttcatcgggttaacacgcaggccatgcttttctaactttggatctgcttccctaaagctgccagatggacggtacaccattggggccaactcataacgggactccgcgccgactggataggtggctgcaccaagacgggccgcgttggcaatgacttggctcgcaatcggttcagcaagctcaatcatcacgtttttagactgggcattgaccatgtaaacatcttcgactccaggtaaagcaccatttttaatacgttgataaagttcttcgacttgttcattttgcgtcgccaacatgactggcgctagcgtcaagctacgtaacagctcatgagcttcatggccttgtacttggccccctcctgaataattgcgggcatggaggcgttcaatcgctgctgcttttccaacaataacgccaatcccttctggcccaagcaacttaaaaccagaaaaagtcgaataatccgcgccatattcacagccgatttttggcatcttgaaggcgcaatagttgtcatcgactacgactggcaaatcaggacgtatcgttttcgccgcttcaatgacttcgccaagctgatacgtatcatgaggagcctgacgtgcatgttggacataaacgagctttgcttctgtagcagccacggcgcttttaaaagcagaaagatcattgtagtcaaccgcttcttgcttcagtccaagctgccgaaatgtttcttttgtcgtcatgtacattggggctgtatgaacaaggcatgtatcgcctgctgccactaattctgctaaaatgagccgaatcgcccctgtgccgctaccacggacaagtgcacaagcttcgctgtcaaatacttgagctaacacacgttctgctttagctgtggtttgcgggcgcccaaaatcaggatgcagcccgacatcgccaagttgataaaattcgttgtcggtaaactcttttgttatttcatcgaccattttaaattgaagagactgcgcttcttccattgaccgatttttcaacagtgcctcgctgtatttcatgatgtcccttccctctttgaaaacgcgtttgctgggttttcaatcaaaagttttcgtatttcctgctgcgacagcccagacgcttccattctcggttgaaactcccgtagcgtgtaatcaaagccttgcccgccggcagcaaaaaggtgggaatttcttgtgatatcagtggataacataattttgtccctatagcctgcttcgataaagcgcaacagcgaagtgagacgttcctgatcagaacggtaattttctttgccaatcgtatccatagcgacgtaacagccagctgctaggacttcaagcaccacgtcatcgttttcatttaaatcttggtgcccaataattacttggtcgagcggcaacccttccttagcgaacagctcgacttgctcaagcgccattgtccccaatgtagtgtgtgtcgccaacggcaaaccgctctccttcgctgcaatgattgccccatgaaacagctctgtctccactggtttgaattcatttaaactgctgccgatttctccaataacaccgggcttgcttggagaaccatcaatgccttcctcaatctcttgcaacataaacgctgcaaattgctcccggttccatgaaagggcctccgccggaataaacgggtctttgtaacagcctgtactggccacaatatgcatatcgagctcttcagataaacgccgcataaattgaatgttccgccccatgccgacattggtcatttcaataaaggcttttccgccggctttaataaaacgggctacgtcttcttttacatggtcataatcggttaatgcggtgtcattagactttttaatatggcttaaatcaatatggacatgctcatggcaagcacatatgccaagttcttcgggcttaatcggtcccctcaccgtttcaatcatcgtttttcctctcctctatgctggtggcgtgaaaatccctaataaggctaagatgttgccaataattccaacagctatcgcgccaacagggcctactgccatccgtacaattgggcggcctccggcttcgtttagtaaataaaatccggcgatggcaaagaagccaaatccagggacaatcgcatttgccgcattggcgccgccgatgagcaatgctacttcaagcacacgtgtcatcgcggtacggatattttccccagaagcacgcacgcctggataacggtcaagaaacttcgctaactttgataacagcaggacttcaagcaagatcacaatcgcaccaatcgccgcggcaataaacgggtttggcgaaaagataccaacagcaaaaacgagtgtaaacccggctggaccatatacgcctgtagcaatagcggtgctggcaatgagtggcacaaaaccaagtgctttcgctagtgcggcaatgcctccctcattaatccggccatctgcaagcaaattcagtgtgatcggatctccagatacaattaacaaatttgcagctgcagcaagcaacgcacctgatgccatgagcacaactgcaaactttttaatccggttcacccggtcgacaaacaatgtcgccatttgttccatgcttgtgtcatccgatttttcctgcatggcaaacgccattaaaaacaccattcctacaacgagggcaatcccttccggactaagggtcaccgatgaaccaccaatttcaataaggcctttttcattggaaaatacaatcagctgccgggcaagcgctgccaccaaaaacgtgacaacccctttcttgacagagaactgcaaagcaacagcaattgctgggaagaccataaaggccacaacaaccggttcgccaaccaaattgaagccatctacaaagttcagcggcaagcgagcaaacaaatcaacaacgacttgaagcccataatagatgcctgctccgtaaagtccccctaacacacctgctgccattgtggaaaatttgcctcttgcgattgacagaccaatgatatccgttcctagcaaaatgctatggatcaaaataatgctgccagcaatagatataggaatgccgaaaccaatgacaagcccaaagctcattgcaaatgcggttactcctaattccttccgtgacatgcgcccttccaagttctccggtacaattgggcgcaacccatcattaaaaacggcgattcctaaattggccatcactgcgcttagcgcaccgattgcaatgagcaaaattacatctaccatggtatccctccgttagctctttatattaagcttttaacgcatcgagtaaatattcgaccgctttttctttatgatcgccggtgaagccaaatgccttgccgccttcctgcacggcttgttcaactttttctttcacaggtggtttcccaggcatcgaaatcgtgtggcagcttgccttgccaaccaacgaaatcgccatcgccaaagcaccgccgcccccagtatggcatgcgccaaaatagtaatctgcttggccttgtttgagcagcatcgctgcttctagatcagacttgacaacggtttcaatatcaggattcttctctttaattaatttctctatttccttcttttctacttggccgccaataacaattttcatcgaaaaacactcctttagtttttggtttaatttctcactatactgctttccttatgaaacagacgaaaatgtgctgacaaaatgcatatagagaaactgctgttcttctttagggagcggttcgccaacaagggattcaattttttcgacggcctccttagcagcaggcaaatgtggggaagcaaggacttcttccataacggcatcccctggaccagtcaacgcttcgttctgttcaattcttgtcaacgccattgccaaatgggtcactaacattgcataattctcatgcaagtggtcaggaacttgctcgtccactacttgggtggtgacacggtatgctttgtccgtgatcgttcctgcttcttttaaaatctgcaaacgtgtatacaattccatcttcaaccctccttaatataatgtacatttttttgtatattgaatgtgaaggaaagttcctaataagaaggaatgatctccccttcaacgacttgcttctggatcgttaacagttcttgtttgtctattaatcctaacaaataagaaatcgtttgtttatctccatgggccacaagcgccgtttcactaatctcctgcgagtttctgactgcaagagaagaagtaagttcttttgcataaagtgtcgggcgctgcacttcatctgcattccacacggtcgcatcgatcaatccagcttctagactttgcagcaagtgcatgtacgtcgtttctacaaatgttaccttctttccttgtgcttccgcttcagctaacgttctttggtcagccgattttgagtcaataccgattctcatgccatcttcaatttcggttttgtcgctgtcagcaaaatagattttatgcttgctgacgtaagattgggcgcctagtcttttttcaatcgtgatgtttgccttttctacggcatttttggcagccataaacgaaacaacggcaaaatcataacgtccttctttgactccttcaaggcgcgggttgcttcctctcatgaaggcaaggtttaagcgaatgcccatgttatggaaaacagtcgtcagagcggtcgccaagccttcgtattttttcgagtacggcaaaggcataaccgccgtaatcgtgttgacaccagcaaactccaataatttcgagacatctttctgtaacaagaatgtgcccaagtgaccacgggacaaaagctcaatcgccttcgcttcttccagtatttttaaagaactttgtatagtgcctcgtcctacatttagttcttgtgctaaaaattcgactttcggaatccgttggcctttctcaatcgtgagtaacagggacgcaactcttagtaatgttttccctttttttgacagaagtgcttcgttcatgttcacctccaccaatatactgttttttgtacaatgaaacattatcatagaaagcgcttttacacaagtgtttttgttaagatttctaacgtacattttcttagttgtcattttcatactattacaattcggtcacatcgcgatttcaagttacttaacactcttcaaaaattaccgcaaactacaagcaaatgactgcaccaccctatagccctatgtaagttttgctcacaaggtttttcgaaaacagaggatgtgtatactagcattgtagagccacacctggaagttgatacagaaaggggttgctttgatggacagccgaattaaatggatcgatgcggcgaaagggcttggcattgttcttgttgtcatgagccatgcgcccatcgacgaaacgcttaaagcctttttgtttgcctttcatatgcctttgtttttttacttgtctggagcagtatttcgtcctcattccatgagtatttgggcctttattaagaaaaaagcacgaagcctgttatggccatacttcgttttttcagctgcctcttatctcatttggtacagcatgacaagacattttcctttcactgctggtgacgacgtcaatccaattaatccgtttgtcggcatctttttgtcaacacctgggaattatcaacttacgtacaacccggccatttggtttctcacttgcctatttgttgtcgaattgctcttttttctttactatcgcctgtctaaaggaagattcattgcgacgtttctcattgtcgctgctatcgccggttacgggtcgaccatgctttcgtttgcattgccttggaacattttcgttgctttaacggcgattgtattttacggccttggccatttgacaaaacatttatggaagacgctcccatggccaagagtactgcttattgccatgcccttatttatattggtgtctttcgtccaagcgctcaatacagagcgtgttgacatgcgggcaaatgtacttggcgaattcggctacttttatttagctgcaattgcaggcatcgccgcctttcttgtgctcattcctaagctgcaacactcaaagacactattgtttctcggccaaaactcgattgtgatcttgcttatccacttgccaatgctaaactttgtccgcgctgccctttattacggatttcaagttgacttaagcaccgctaacagtttgccttggacgttgtttttcacagtcgttacgattgtccttgtcgtcccatttatctatttgttgcagaaatacccatggctgcttggaaaagcaccattgaaaaggcaggggcggttgcagaagcaacacgccttacaaggaaacgctgtgccccgctaacagggcacagcgtttcagactgtagacaaacgctcgcatacttcgtcgattgtctcggtcatatgctcatgaacccccgttctattcgcatcttccctcgcctgcactcctcgtctgacaagcgttttctatcagtctgatgattttgtcgactttgtcgacaacctccactatgcccgctaacagggcacagcgtttttttaaccgatcggccagttttcttgtttataggccatatcccagaacatatattcatagcggctcgtattcataaagatcgtttcaatccggtctagttcggcctcgctcttttctgcggcaagctcgtctagcttggcaatcagccagtccgcaattgcgccaaactcaggcgaagagtacattttcacccattctccgtatgcctcatgttctgtggcgcctggaatcttcgcgagcgctgtgccaatttcataatagctccaagcacacggcaaaatcgccgcaatgagctcggcaagggaccctttttgtgcttcagccatcatcgcgctgctataagcaagcgttactgggccaggaactgtctgttccaactgttcctgtgtaattccgaggcgcttcgcatatgcgcgatgcagatccatttcgctgttaagcgtttcatcaagcgctttcgcaaaaccagacatcgtttccaaatcaggtgccagtaccgtgccaagggcgataacgcgggcatactcgatcaaatatttataatcctggcacatataatattgaaatgcttctagttcaagagtgccgtggccaattccttggacaaacggatgattgtggctcgcttgccaaatcggatcagcgtttttacgaatacgttctgaaaacttcataagttattctccccttttttcggtattgcaccatttataaatgaaggcgacaagcgctttcgtataacggacgagttcatcaatgtcaagctgttcattcacgccatgggcgtgtgctaatttcccaggcccataacaaatcgtcggcattccatattcggccaaccagccaccgtcgttcacgctagttgacatttctatttccaatggagcctcgaaaacagtctgatggacggtctttaaaacagataatgcaggatgagcttcatcgattgaaaaagcagggaatacttcccctttgtcttcaatcatagaggcgccgccccaagtaaaggttggaaggtggtccttcaaccacacatccgctttagctgtagcaagaagatgggcttcaatttcgttggccacttcttcggcagattcatttggataaaaatgcaccgttacccacaacctgcattcatcagcaataaacgctggatggcgcccgccttcaatgacagctggattaatcgtattggttccaggtggaaaacctggatacgactttgtcacagcccagtggcgctcaagttcttgcaaagcagcaatcagtttagccattttttcaatcgcactagctccctttaagccaccaccggcatggatcatattccgccgcgtgccatcatggtgagtcgagtcactttttacggtaatccagccagtaatgacaccgccttgtccatggacacggcagttgcttgtgtcggctacaagtgcataatctgccgtatagcctcgctcacaacattgtttcgtgccagcctcgccgacttcttcgcctgtaactgcttcaagcaggacgtcgccctttagttcaatgccatgatcatgcaaaagacgcaacgcaaacagacaagcaccaagcccgcctttcatatcggcggcaccacggccatacagcgtccgttcttctaccctaggagaaaaaggagcgtatttccattggcttttttcttcctcttcgactgtagcgacatcgacatggccatttaaaaggaggctatgatacttcgttctatctgtgccttccttcttcgccacgatattccaatcgcctgggtacgattcccacttatcgacagccatccccgcagcacgcaaatagctctcaatatactgttggatatcggccgtatttcgggctggaggggctatggtcggataggaaatcaaatcagacacaagccgaatgagctcctcttcccgttcttccacttgcttaagcaacgattccacctggttgttgtcctccttttccacacaaaaaaaccgctacttaaaaaagaagcgggtggcatgtcgagaaaacgtgcccgcttccctccgctggtccgaaccagatcaggtgataagggttaaggcgtttgcctctctcagcttccatcattcgaagcacccctagcggttttagtgattgttttgatatactaacgctaccatatgtaagcgcaatcggcaaggcttgatcttttatgaacacgataggagatggcttttatggcttttccacgtaaattgaaacgcttgggtctttttgggcaaatgactgcattaatggctattgttcttctcgtttcattgctgcttgtaacggtgttcttttcatccattatcgacgggatgattgagcgaaccacgggggaaaaagcactggcggcagcggaactaatcgctgaacacccggacattattgatgcgtttgccgaccaaaatccagcagcacggattcagccaattgctgaaacattgcgcaagcgcacgggcgccgattatgttgttattgccaatacggaagggattcggtattctcatcctcatgaaaaccaaattggccagaagacagaaacaagcaacgaagcgcctcttgccggcaaatcaaccgtttttattggcaatggaattcttggcgaggctgtaaaagccaaaacgccgattttcaatagagaaggagacattatcggcgtttcatcagttggttttctaacgactgaaatcaaggatgacattcttttttaccaactgcgcgttgctggctttggcggtttagccctcttgattggcattcccggcgcactctatatcgctagacgcgtcaaaaaacttatcttcgggttagaaccggaggaaatctcgcgcgccttttcggaaaaacaagcaattctcgaatcggtaggggacgcaacgctggcagttggccccgatctccagattctttcagcaaataaacgtgcacgagtaattttagggagccatgtggatggcgaattaactgaacctcaattgcaagcgtttattaaacaagctgctgaaaacccggaaaagattacccaacagaggctattgatcgctaacactctttatattgttgatgcggcgccaattttagctaaacatgcagcaatcggctttgtgttgacgatccgcccgttttcagaagtagaggacctggcaaatgaattgttggagattaagcaacataccgaacatatgcgagcgcaaacccatgaatacttgaataagcttaatacattaaatggcttattgctgcttgagaaatacgaagaagcaaaagcgtttatgaaagcggaagtaacagagttgcaagaaacagtcaccttcctcatggcttctgtgaaagacccgcttattgtcgcagctttgcttggcaaagtaaaccgtgccaaagaaatgaaagcagcccttacatttgcagaaggaagcacttggctcgattatcctgcgacaatcaaaagcgaccatgttgtgactgtcatcggcaacttaattgacaatgccttagaggcggctgttgctcaccaaggagcaaacgcccatgtccatattgcttttaccgattttgggaatgatatgattatggatattgaagacaacggcaagggtatgacccctaaagaagaagcgcactatttgcaaacaggggcaacaagcaaaagcgagggccagcacggccttggtttaaccatcatgcaacacgcccttcaccagcttcatggcacttggttcatggccgaacgccctgggggcggcatgcgtatgacgattgctatacctaaacataaaagactgtaaatcatacaatgcatctttataaggaaacaaatcagaggagcgaaccaaactatgcaaaccccttccatcggcgtgctgattgttgaagatgatccagtcgccgcttctgtttacgaacaattgattcaaagcaaactagattttacgattgttggaaaagcggaaacagcgaaagcgacaaaacagcttctccaagtcattacgccagatttagtgttgctcgacgttcaattgcccgacgctaacggcatcgacttgctgtttcacattaagcaacttgaccatcatgtcgacgtcatccttataactgcctctaacgatgcccaaacagtaggagaggccaaacgaggaggcgcatttagctatatgctaaaaccaattattgtagatcgttttttccaaacacttgaggaatacaaagcagcgagaacgaaaggcaagccgaaaagtaccgatgccgaaagagacattcaacgtttgttccaccatgataaaacgggccaaccggcttccaatgttggcctgcgtacgtctgggccactcccaaagggaattgacaagcatacgttaaaaaacgtggaagaagcactcgtacatattactgaaagtgaaagcctaaacgctgagcaagtcggcaaacgcattggcactagccactccacagcaagacggtatctcgaataccttgtttcgatcggcgctgtcaaagtggatgtcgtttatggacatgtgggccggccagaacggcgctataagcaagcagcacgcaaataagcggcttgcttttttctacgactgccgagaatgaaaaaaatgaaaataatagccacttatgcaaaaaacgcaagtaaactatcgctgtcgcaccttccttgctacattaataaaaaagaaagcggtttcagtaaagaaggggagaatgtctatgcttgcagttttaggctacagcatgattgttgtttttatggctttaattatgacgaaacgaatgtcggctttgcttgcattaataattgttccaattgcatttgccttaattggcggcttttatttgggcatcggcgaaatgatgttggacggcatttcacaagttgctcctactggtgtcatgctcgtattcgccatcctttttttcggcatcatgatcgatgccggtttgtttgatcccattgtcaatttgattttgcgtgttgtcaaaggcgatccgctaaagattgcgattggcacggtttgcttggcatcgcttgttgctttggacggtgatggcacgactacatttattattaccgtgacggcgatgcttccattatacaaaaagcttaaaatgaacttgtatatgttagcgactttggcgcttctctcgattggcgttatgaatatgacgccttggggcggaccaactacccgggtaatcagttcattgcagttaacgacagaagaagttttcttgccgctgatcccagtaatggcattcgggattgttttcgctttacttgttgctatttattttggcttgaaggaacgcaaacgccttggcatccagcaaattggcgaaccaactgctgtagatatccatgcttcggaaagccaagtcgccgctgctgttgcgagcgaaaacgaactaaagtcattgcaacgtccgcgccttatttgggtaaatgccttcttaactgttgctttgcttgttgctttagttgccggagtgctcccactcccggtactgtttatgatcgcctttgctattgcaactatgattaattatccgaacctaacggaacaaaaagaacgtatagtggctcacgccggcaatgtcctttctgttgtcgctctcgtgtttgcgtcaggcatttttacaggcattatgaatggaacagagatggtcgatgcgatggcaacctcactcgttaacattattccggaagagcttggtacgcaactgccgctcattacggctttaacaagtatcccatttacgtactttatggccaatgacccgtactatttcggcattgttcctattattgctgaaacggcaaataattaccaaattcccattgccgaaattgccagggcttctgtcttgagccaaccaactcacgtactaagcccgttgtacgctgctggctatctccttgttgggatgcttggcattgactatgggcaaaatcaacgctttgctctaaaatggggcctcggctcaaccctgtttatggttttagcagccatcttgttaggcgtcatttctatttaagggaaaatgcaaaatccgagttgatactcggattttttgtgtaattagcccgatggtttgcatagaaacgattcgctcgttcacgtttgggttaaaagtggcaagcagataacatgaccaccattaacaaagggaaaagcacacaactaccttgagattttcccactatctattatcctcttcttcctcctttaattcaggaaaattctcaatcattgatcgaacatctttaacaaactcttcctctgtatattgaccatccgcatgttttaaaatatccagtttgccacaaataatcttcatgattccctttgcgtgttcttctttcaagccgtttactttatcaatcatcttatccaactcaagcattcaatcattactccttccgcttcctctacacctaatattaacataccaccaattcgtttttatagatgaaggcccatccttgctatacgagcgcttttaaggaatggtcttgttccaacttgttattgtcaaaaataaacatgtattatttattgaaaatacagtatagtataatctacatttatattttcattggtttcaactattttgtaagcgctgtcatacatgccaatgatccttagaaggaggttccaccatgaaacgtcttttcctgtttttcagtgtgtcgctccttgtttgttctagttgtcaatttgcccctatgtcaggcgagtctaaaccggtcattacactttggtattggaaccgcagcctgagtgatgatgtgattgcgaagacgcaagaagcctttcctcatgtgacgattgatgcccaaaagatcggcggagatgaatacaagacgaagttgcatacggcactcattgcggggagggggcctgacattgtcgccatgaatgactgggcctatgagtatatcgcttacgccgaagagtttgtcaatttgctggattatggcgcagatcaattagagcaggagtacttggattggaaatggcaggctgtacaagacccagaaaccggtgcgctcattgccctgccgatagacactggcccaactgccctttattaccgagcagacttatttgaggaagcgggattgcctaccgaacccgatgaagtgcatgcccagttgcagacatgggaggattatatcgaggcgggcattcaaatgaaagaaacaacaggtgtccatatgtttgaatcgattacaaaaccttatttgcaagtgattgagcagcaatcagacaaatactttgctgaagacggcacttacatcggcgatggagaagcgattcaatatgcttggaatacagcagtccgcatccacgaagaaggcctgtctgcacgtctgacagaagggcaagaagtcaatgccgctttaaacgggggcgatgttgcttcacgggtaggagcagtttgggaatcgcaaattttacaggatgctgctcctgatacagcagggaaatggcgtgttacgagagcccctggcggagacggcaataacggtggttcctttattggcgttcttgatagctccgcccataaagatgaggcagtggcgattacaaaatggcttgtatcaccagatgcccagctcgaccattttttagacgtcaatctttttccttctgcgattgagacgcttgagtcagagcttttgcgtgaacctgatcctttttatggcgaccaagtagtagcggatgtttttgttgagtcggcgaaaaacgtccctcctactttctatggagaacattacggcaagtttcgcacgatttttaatgatgagatggtgctgatcgatcgagccaataagaatccagagaaggcttgggaggatgcacagaagaaagcgcaacgggaactgtcaagaatcgatcaataaggaggaatacgcgatgatcactaaaccacaaacagaactcgatgagatgctccgtcaatataagccttctctttgggctgaaatatggaaaaaacgcaccctctatctgttcatctctcctttctttcttttatttgcggtctttggcatttttccaatcttctattccttgtatctgtctttccacagttggtctggattaggcgaaaagacatttgttggcctttcccaatttcaatatttgcttggcgatgctgagttctggcaagctgtcggaaacacatttgcgatttggttcctctcaagcattcctatgttgttctttgctttagttatcgctttcttacttaatctcccttccctcaaagggaggagcacctaccaaacgatgttctttatcacgaatgtcacctccattgttgccgtagcgattatcttcgaaacgattttcagcaaccaatacggcttaatgaactacttgctctcactcattggcatcgcgcctctcgaatggctgaactcaggtttcttagtgaaagtcgtcatcgcctccatggttgtttggcggtttgtcggctataatgcgatcatttatttagctggcttgcaaaatatcccaaaaaccctttatgaagctgccataattgatggagccaataaaacgcaaattttctttcgcattaccattcctttactgcgcccaatcattttgtttacggtcatcatgacaacaatcggctcgatgcaaatttttaccgagccgcaaatattactaggcaattctggcggtgttggcggagctggcatgacgatgacactttatatgtataatgaaggatttttaaataaccaatttggttatgcttcggcagtttcatgggccatgttcatcatcatcgccttgttctcccttattaattggaaactagtccagaaagcataaggaggaaatcagatggcatccgataaatttctcacgaaagcattaacccattttgtcttgcttattggcgtcattatctcgattttcccgttttactggctagtcgtcatggccacgaatacaacaagcgatattttaagatttcctccaaaactgactttcggccatgaactgtttacaaatgtgaagaatgtgctggcttcgattgacttttaccaagctttttttaacacgttatttgtgtcaaccatcacggtcattggcgtgttattcttttgttcccttgccggatttacattcgcgaaatttcgttttccaggaaaaaacatgctgttcactgctttgctgttaacgatgatgattccttcacaaatgagctttgtcccttctttcctgctgattgccgagtttggctgggtcgattcgtacaaagcgttgatcattcctggtctcgccagtgcgtttggaatcttttggatccgccaattctgccaggacgcggttcctgacgaattgcttgaagcaggaagattggatggctgcaacacgttccgcctatactggaatgtagcactgccctcgttgcggccagcgctgacctttctcggcatctttacattcatcggcgtctggaatgactatttatggccgctcgttacgatcaactcaccaagccgttatacattgcaagtcatgcttgcacaactgaacggggtgtatgacaccgattacgcgatcatcatgacaggcacattgatggcgacattgccactcattgtcttattcatcattttcagcaagcaatttatgaaaggtgtcgcggaaggagctgtgaaggagtaagggaccgcttttaatcgtgcaaaagataagaaaaacggctttcccttcgttatggagacaatgggaaggccgttttttgagtacagagtcgggacacctagtgctctattgacgacaacttcgctttttcctcaaaagaaaaagcttcccgcataggaagctttccaccttaaacgaacatatttgcaatgagtagcataataagggagataaaccaggcaatcgtagtcggcactgaccagacaaggatttgctctttcgcctgcttaatgccaattgtgcggttgactacccagaacaaactatcattaaaataagagaagaataatgaaccgagagcggctgcttgtccagcaagcaccatattgacatccatatcggctaaaattggcgctgaaatggatgcagctgtaatcatcgcgacagtgccactgccttgaataaagcgaacgagtgtagcgatgacgaaaggaagcataattgcagggattcctgtgtttacgacgatttctccaatatgctcgcctacgccggtctgtcttaagacaaagccgagggcaccgcctgcgccggtgacaagcaatacgatacccgcttgcttaatgccttcttccatccgctccaatgcttctgagcgctggatatggccgaacaagccgtagatagcaagcagtacagcgattcctactgcaatgacaggcgaaccaaaaaaggtcatgtagtcgacaaatgggcctgatgcttccattgcatttaatgtagtattcataaagatcagcacgatcggcaccacgattggcaagcacgagcggagcaatgaaggcagctctttttgttctttttcttccaaccattgttctacatctagctgtttttcgggacgaatccaatccattccgtcttcgctcggaacttggtaaatccgcttgccaagccattttgcgtaaatgaccatcgcaatgacaattggaatggcaaacaacatgccagagataatcatccaaccgatgtcaatatcgaatattcctgcaactccaaggggacccggtgtcggtggaacagcactatgaatgacaactgcgccaccggcgagagcaacagcaagagcgacaattgattttcctgtcttttttgacaacgctttcgcaagtggactcaaaataataaaggctgaatcaacaaagatcggtatcgcgacgatatagcctgtaatggccatcgcccactcttccttacgttttccaagaactttaacgatcgtgtaggcaagccgttcagctgcacctgatacttcaagaattcggcccatcatcacgccaaaaccaatcacgattgcaatcgagccaagcgtgctgccaaatccttctgtaatggcattcaccacgtctggaggcgccattccgccaacgagccctgtaattgaagcagcaataattaaagccaaaaagacatgaacctttgttttaacgacaagaaaaatgagcacaacgatagctaacacgaggccgaccatcatttgtgtttcagatacttccataagtgtttcctccttcttgtaagcgctttataataagataattagctgggctgctcgtcgcagcccagtcggttacgcctgtttaaaatgaggcgcgtatttagcggcaagcttaatgctttcttccatgctgactgaacttgcaattccttggccggcaatatcaaatgctgtgccgtggtcgacagacgtcctcaggaatggaagtccatttgtaatggaaatggtgcgatggaaatcggtcattttcgcagcaatatgcccttggtcatggtaaagagaaagcacggcatcgtaacgtccatttaacgcttggaaaaagaccgagtcagcaggaactggaccgacagcgtctatcccgtctgctttagcaagctcaattcctggcttgatttcatccacttcctcatatccaaataatccattttctccactatgtggatttaagccagctacagcgaatttgcgcttttcaacaccaagctttgcgagcgctgcatcacagcggagcaaataatcgtggacacgttccttcgtcatttgtccaatcgcatcttttaacgacaagtggcgtgtcaaaaagaaaatgcgcatgttgcggacttcaaacatcgtaagcggatcagcaacatcagctaggccagcaagcatttccgtatgcccaatgtatggtacatttgctgctttaagggattctttattgatcggtgctgttgccattgcttgtacttggttggttttgcaaagctcaaccgcatgttcaatataagcaaatgcttgtgcaccgcattcggcgctaactttcccaaactgataatcaccgaggtttggaaaatcaataacgtcaattgttccatattcaccctgtgcttcagctggagtgttaactttgttaatcgttaagtctgctttgactacaggcaacagtttttctagcactgctgcattgccaatcacgacaggcgtgcaaagatcataaatttcgctcttattcaatgaaccaactgtaatttcaggtccaattcctgctggatcgcccattgttactgcaataattggttttgccatgttatccctctcctttgtttacattgcttttgtctcaataaatttgacacattcgtaaatcgcttttttatcgccaattaatccgccttttgtcacaactggcaaaccgtcaaaatagccgccgtcaaatgtgccatatgcagcaaggggcatgacttcgtcttttaaagcaatgccattcgcgcgcccgagcgcacagacggatgctgtcacatcaccgccgcttgtaaaacaaccagcaaactggacacgctcgcttgttagcaatttccggctaatcgttgccagcccatcggtaatccgtttcgcaagggcatcactgctctttccttcttctatcgcttttgcttttaaatcgactagttcttggccaggcttgtgtgttgttacaatgagaacgcggtctgtttcagcttgctttaatgcagcttttgttgctcgctccacttcctgtttccaagaccccccataactagcaaggggctcagggttcacatacacgggcgtggaacctgttttttcaatcagatacgctagttgcgtccctgttagacttgttgcactgccgaccgccactaaaatgtttgctttcttcgcatagtcgcgggacatcgctcgagcataactagccgtcagcgggccaggatcagcacacaacactgttcgcccactggacgcaagtgcttcggctacttcatcaatctgttcattggtcatcgcatcaacaacgatgattcgtgcgccagtttgcaattggagcgacagctcatttaagaaagactcttggccttccatgacagcgctaagcccgacatagcccacttggtgatgggattggtctccgattaaatcagggacataagactttttaattggtgcgatcgggtcttttgacacatatgtttcttgaaggggaatgccatctagcaacaaatagccccctgccatcgcccggccggaatctggaaaagacggcatgacgatgcttatggcatcttccgccattcctttaagcatttcatcgatctctgcaccaatgttgcctcttaatgtgctgtcaatccgttttgtaaaaatggcagcgccccaattttgcaactgctccatcgctcgggcaacacgctgtttggcgacgccttcctcaatgtaacggctatcggtatccataatgactgcatcgtagaaactgttggcaggcaacgtagcactatggacaatcgttgacgcttgaaacccttgtcgaaccagtttcacgccagaggcattcgcccctgttaaatcatcagcaataacgcctattttcattgttctccccccgttcgcctacatcggcgccaaccgcatgttttcatggcatgcctccatctcgtgcccttggattctcgagtcggtcacaattccttccaactcattcaaaccacaaacacgggcgaatgacgtttcatcaaattttttggaatcgcatacaagccatgtttttgctgctgcttgcatcatcaactttttgattttcgccttttcaagcgtaggcgctgtgatcccggctgaggcatggacggcatgggcgccaagcaaaaataaatcaacgtgaatattgcgcaatagctcttgggcatggggtccgtgcagcgccccgagttcgggctggacttcacccccggttataatacaacgcggctttgcctcaatcagttgtgaagctatctttatatcattggtaataatggttaaatcattccggtctttcaataacttaacaatttcaagcgttgttgtccccgagtctattagtactgttgatccgttttctacaagttgtgccgcttcccgtgcaattgcctttttcgctggcaattctttcgtttctttacgggcataaggcgtctccttgacaagtgctttttgcagcacagctccgccatgtgtacgaataatttggttttccgcttcaagcaaagccaaatcgcgccttactgtcatatgagaaacatcaagggccttggccaattcatcaatatctgcttttccagcggtcgccaacaacttttgaatatacaaacgtctttctttaggattcatgttcttttttcacatcctacattgttaatttagaacaaaaaatagcggttgtcaattaaaaaatgttctttttaaacataaatcgacatatttctgcacaaaccaaacaaaaaagcggtatatccttattatacctgatcgtttttcacaagtgtactagcgtgaaagaatgagattggaaaagttaacgagtaaagaaagagaggaaatcatcaattgagccttcgatttgcacttaatgccagaataaaacgcatagaaaggagttggatgctacatactacaactattctcacttcaggcaggaggtgtccctctaagatgaaacaatccgcaccgcctcatgactacttagcaaacaagaagcctagctctcatctcgctgatacgattgactttattttaactactaccggacatagcgaagatatactcgtacggcctttttcgtttgggagaaaccaaacattaaaagcaacttttatttatgtagagggactttgcaatgaagacgcaattgaaaaaatgataagcagagcgaaattttttgatgaaaaggaacctgtgtttgaaagcgcacaacagtatttagaggaagtaggccatacagaaacgcttaattgtttccgccccctcattgacaaacttttcattggctatgccatttgtgtaatcgatggtttttctacacctattgctgtcgctattcccttttataaagaaaggcctgtatcagaaccgatgacagaaaaggtcgtccgcggctcacgagaaggatttgttgaaaatgtgcggacgaatatctccctattgcgaaggcgaataggcgacgaacagttatgggttgagacaaaaacaatcggcacccgcaccaaaacgaaaatcatgatcgcctatatgaatgatattgtcgacaaaagcatattacgggaactacatacaagactagatcgcatctacactgattcggttttagaagacggaaacatcgaggaattaattgaagaccaagtatatacgccttttccgactgtatactcaactgagcgccctgatacaacggcagctcatttattagaaggcaaaattgcgatactgagtgatggttcgccaatggctcttattgttccggccctattcgtgcaattttttcacaacgctgaagaccatacacagcgtgctgacatcggaacccttattcgtctgttacggttcttgtgtatttttatcgcgatgttggccccctctttttatatcgcgatcaccacattccaccaagagctgatccccacagggctgctcggcaatttagccgcgcaacaggaggggacgccatttccgacatttgttgaaacattaatgatggaagtcacgtttgaaattctccgcgaagctgggattcgcatgcctcagccagtcggccaagccgtatcgattgtcggcgctattgtcattggccaagccgcagtgcaagcaggcattgtctccgcagcagttgtcattgttatctcgattacggcgatcgccagttttgtgtttccaacatacagcattggcgtaccaatccgtattttgcgatttgggtttatggctcttgctgcttcttttggccttttaggcatttgcattggctttactgcggtgcttttacatttatctactttaaaatcatttggcgtcccttatttaaaagggctttccccatttatatggaaagaccaaaccgatacacttttccgcgcgcctaagtggttgatgaatgagcggccagaagctacgacaaagtcgaatcaaacgcggcaacgcacgccaaagcctagccctaaagattgagtgaaaggaggaaacggctttgaaagcaaaaatacagaaaacgatgatcatggtcgtctccttttttcttttaagtggttgctgggaccgttgggagctcaatcagctttccttaattgtcggcatagctgttgataaggagggagatgattatgtgttgacgatgcaggcaatgaaccctgcagaaatcgcttcccaggaaaccggcagaggctatgcacaaggaatggatgtccgtgaaaaatcggaaacgattcatgaatcgttacggaaaatgatccaaaaaacaccaaggcgatcgtttgtttcccaattaaaagtattgattcttagtgaagatgttgcgagagacggtttagaccatgtattggatttcttttatcgggaccacgaaatgcgctctgattttttcgtgttaatttccaaagatacagccgctgaaaacattttaaatgtgctcacaccgttagaaaatttgtctgcacaaagcctttttgattcggtcgagttttcaggccgttcttatagcagtaccaaaaaactgacaatggatcgtctgttttatgaaataaaggctgtcggcattgatccttcgattatgggcgtaacggtttccggagatatacagcaagggaggacgaagaaaaatgtcgagcaaaacatggcagctgcctttgtcgaaacgaatggtttagctatttttaaaggcagcaaaatgattacgtggctttctcaaccacacagcaaagacattgaatacttaaacagtggaattgaaaatagtgtcaaaagcttcacttgccctggcggtggcaacatcgcactagaaatccattcaaacaatccggctataaaaatggagctaaaagatgggatgccttcagtgacatacgatctctcacttgaagccactatttcagaagtagattgcgtggatttggacttgtccgtcccttcttcctatgaacaggtcgaaaaacaggcgcaaaccgagatggaggctaacattcatgaagcgattgtcgcaacccaacaagcgggttcggacatccttggcatcggacaggaattgtatcgaaaattccctgattactgggagcaaatccaggacgactggtactcgatctaccaagacctcgatgtaaaaataaatattgctatcaccattactgatagtggaagcattatcaattctttttcagaaggtgaacagtaatggtgctatcctttgtttgcgtcctgttaagcgcatttgtaatcacatgggtaaattggcgcgacttaaaaggcaatcgaaaattgcaggttgtcttttatacgattttggccattgctacaacatacggcgcactatacacaataggattagagataccgagcattgcccgagggctcacttcactcgttaagtcattttaaaaagcaacgccaagaaaaggaggatcagaattgagaaacacagtggaaacattttcatcgcgttcttttgctacgatggtccttttcgcgacagttagcacggcaatgctcggtcttccagggtcgttgagcttttttatccagcaagatgcgtggcttattccaattatcggcagcatcgtaggcattccgattattttcctttacacgttgcttgcccggtggatgccttctgatgtcatttttgacatgaacaagcgtactttcgggaaagttatcggttggcttgcttcctttttctatattttgtttccactgattcatttcccagcgattatgagctatgccgttacgtttattaaccattttttgttgccgtcgacgccttttttcgtatgctacttgctatgcttgtccatcattgtattcggcgtcatttgcgggatcgaagccatagcccggacagcatcgctatgtttgcttttctttttcgttccactcacactgctaattggcttaactttgcacgacgttgatattggctatattatgcccattgcccattctccaatggcagcaacgatcgaagcgttcgccatttatatgggcaatgtcgtttgcaacgtcgtcatccaactttcgattttccctaagcatataaccgataaaaaagcagccgagaaagcgctctggctcggttattctcttggttgcctgattttaatcgtgtttacattcctatgcatcacggttttaacgccgcaagttgtatctcgtgatttttacccagccctttcacttgcacagcgcatcgatgtcggccaatttttccagcgaattgaagcaacaatcacagtcatatggtttatctccatttacttcaatttacttctatatttctatgcgatcttaacgggaattggtcatttattcaatttgaaaaaaaacaaaccattagtgtggccaatcgcaatgctgttattgtttcttggcgtcacttatttcacaagcattattgaagaacgtgaattttttcgattcgtaagcattcctcaatcaattttaactggttttttcctgcctctgtttctcgttgccgtcggcctaatcaaacgacgcaaaaagaaacagcctctttggccgaagcacgctaaagaaagcacagggctgcctacttcctaacaaaacggagttacacccactcattcagtctctaacgagaaaagagctgcccttttgtggacagccctttctatggctattattcgtttggaatttcccaaattgcttggcctgacaagagaatttcttcaaaaataagctcataatagtcggcttcacttacatcaaacaccacttgtccagccattgtccgaccagcgcctatcgtaccgtcgagttccccatcttggtcgcttacaatcgttatatcttgtgagcgaccctcgtttgtcaccaattcaaattgcattagtgaagaaagcgtatagtcttcgtcaccattatttacaaccgttatatcgatgtacgcatacttatccttagaaggctgctcccactcgctgccttcactaaaatctacactgttgacagtgattgaaaggtcattaaagtttacttcgtcgccaatttgaaaacctgaaacttcttccccttcgtcaacttcagctccgtcttcagcctctgtttcactgttgtcttcgctttccttatcggtgtttgtctcttccgcctcagcatccgtatttgaatcgctggcgctaatatcagcttcgtccccgcaagccgcaagagccaatgtcgatgcaagcacaagcgctgacagtgtcatatactttttcatgccagacccccctattaacctataaatatatgtaacaatcctccaaaaatataacataatggacctagtaatgtaaacaagaaattttgcatttttagtaaattttccatgcttttcgacagatagacgacaatccgtctagttttattatcggtggaatttcatttcatttaaggcttatagctaaaattgccctttacagagtacgatcaaagcaaaaagagcattcttgcagaaaggatctaaggaaatatgaatcgaaggacactcccgctacacgtttaaatttccgtccgtaaatcccagagctcagggaaaaaacgttgctcaaggacactctttaagtagttgactccagatgagccacctgtgccaactttaaagccaatgattcgctcaactgttttcatatggcgaaaacgccattgttgtaaccagtcttcaatatcgaccagtttttcccctaattgatagaggttccaataacgatctacatgtcgatagacggtcagccacgcttctcggacagaatcatttgccacataaggttttgaaaaatcccgttctatcacgtgttggtcaacggctaggccagcatttgccaaggcttgaatcgagacgtcatacaaactcggtgcatgataggcttcaaccagcctttcatgcaactccttgtctttttcgtagatttttaagatcgctcccgttttatggccaagagcaaactctatgagacgatattgatacgactggaaccctgatgcctggccgagttgttcccgaaattccatgtattcagttggtgtcaacgtagaaagaacgtcccacgcttgaatgatttgtgattgtgttttcgagacgcgtgctaggcgcttaaacgatgatggcaagtcgttttctttaatagaagcaatagccgcgtaagtttcatggaggatgagtttcatccaaagctcgcttacttggtggataataagaaagagcatttcatcatgatgattcgacaaccgttcttgcgccgttaaaatttgatcaagtttcaaatattccccatacgtcatcctgtttttaaaatcggtatggattcctgcttcttcctgtgacgtttgttggggaaaaggcttctgttcgtttgtcatacccatgcccgccttcctgtttaaatggctcggataacagcccgtactggactaccatctgcctcttccattggcaaaggcaaggcaatcaactcataatcgccttccttgaccttatctaacatgaggttttctaaaatagagatgccattgtctgctaaagcatggtgcccttctagctctttactatcgagtgggtcaacagaaggaacatcgacgccaattagtataatccctttctccttcatgtaggcagcaccgtctggagttacatatggaatgttttcaggaaatgccgttgcctggttagggacagctgtctttattaacaacctttttactccttctaaatggagagaacgaagggcagcttggtcgattttttcgtatttagataaatcaacgactctcgcttttcctataaacacatgaatatccaagtctgttattttggcaccgtcatttttaaaatgaaacggcgcatcaacgtgagtaccagagtggacactcatcgccatttggccaatattgacagaacctgtttgctgtttggaaaacgtcaactggtacgaatatggcaaatcacctggccagtgggcaagtttttcattaagtggctgtgatacatcgatccagcggttcatgttatttgtatgattcattaagcaaccacatcccgttcatttttaaattttttgtaacgctcttctttcataatgaactttaatacttgaatggtattccatacttcttcaaacgtattgtaaagggcaaccggtgcgaggcgaatgcctttcgggctgcgaaaatcaggaatgacgttttcttccttaagcgctttgcaaatacgagcggcttcatcatgttcaatgtaaagatgggcgcctcgtctttcatcccttgggttttggatcgtaaactggtaatcggaaagctcgtgctcaattagtgtcatcatatagtcagtcagttttaacgactttttgcgaatttgttcgattcctgcttctgcaaaaatggcaagagacccaatcaaaggggcgatgctaaaaatatgaggtgtaccaatttgaaaggcgccggcatgttcagcgggcgtgagcgtatgctccatgtcaaactgtttttgtttgtttgaactaaaccatccggccaggccaggacgcctgccaaagtgcttttcgtttacaaatagcgctgctacgctgcctggcccgccgtttacgtgtttatacgtgcaccaaaaagcaaagtccacatcccactttcttaattgatgaggaatagcaccaattgaatgacataaatcaaacccgatcagaatgtttctttgatgagcggctgatgtcaaccgttccatatcaaggatttgcccgcttcgatataaaacactcggcaaaacaattaaagcaatatcctccttcatttccgcgataatgtcctcttcatttagaaggtggccattatcacttttcacttgaataaggtgttcctctggatcaaagccttgaagatggagctggctttttaatgcataaatatcactaggaaaattcagctcatctgccagtatttttgttttctttccttcaggccgaaaaaaggagctaactaattgatgaagatttgttgtcgttgacccagtaacgatcacttcctcccccttcgcccctacaagggaagccattttctctcccaatgattcagataaataaaaccaaggatgcttccctttcgtccagccatcaatcccatactgtttccaggagtccaatacgtcaagcaatgactgctctgcccgtgtagatagcaagccaagtgaattgccgtcgagatatatgctatcttcatctatgtaaaactcattacgaaagcgggcaagtggatcaactgcatccagttgttgcgcatattcttttgtgtaaacgctatcaaaacaaggcataggagccctccttaataagtatcgttcccgttcattttactgttccttttgagaccgcgtcaatgctaaggaattcgtaacagtggctttaattagttacacgattgaggcagaaaacaccgcgcgaaatcaattcgtccatcatcattgggcctttaacacacaaagaccccaatcctgcctttttgttgcaggattggggtcttttttagttaacctttacttttttcttctcttgtttgcttctcagttggccgcaagccgcatcaatatctgtgccgtgctctaagcggacgccgcaattgatgccctttttcttcaatgtgtcgaaaaactgggaaatggcctcaggttcgctgcgttggtattggctatgctcatcgactggattgtacggaatcaagttcacataggaaaggtggcgtttatcaccaattagctcagctaactgcaatgcctcttctttatgatcgttgacatccttgattaaaatgtattcataggtcacacggcggtttgttttttctatatagtagttgatcgaatccattaatttttcaatcggaaacgctttgttgattttcataatccgtgacctaagctcattgtttggagcatgcaaagacacagctaagttgacttgcagtttcaagtcggcaaactcataaattttgtgggctaggccgctcgttgatacggtaatatgccttgctccaatcgccaaccctttatgatctttaatgatctcaagaaaatcgactgtattctggaagttgtcaaatggttcgccaatgcccattacgacaacgtggctcacgcgctcttcttttcctacttgatccaaatggaactggactttcataatctgctcgacaatttcaccgctggacaaatcgcggtttttagtcaataagccgctcgcgcaaaagctacagccaatgttgcagccgacctgtgtggtgacgcaaacggaaaagccatacttgtggcgcatgagcaccgtctcaattaaattgccatcttgaaggcggaaaagaaatttaatcgtaccgtcctttgactcttgccgtacatgttcgctcattgtctcaatcgcaaaatggtcttccaagagctggagacagtctttattgacgttggtcatttctgcaaacgtcgtcacccgtttgcgataaagccagtcccacacttgcgtggcacggaactttttatggccacgctccatcagccagtcagtcaactgagccattgtaaggccgtaaatcgattcctttgacatgtttttaccctcatttcgttcgttgcatgcttattcgaagttcgcctcatgacacggcaaacggatagtcgtattctcaaaccctaattatagcatagaacacgagagaaagaaaatttgtttttaggttcacttttctggttcaggaaggagaaacttacagatggtggccgccaccagcaacgcaatggaaatataaatcgcatactgataatgaccgtattccgaatagagccaacctggcaagtacgctcctagagcagaaccaatttggtgacttaaaaacagccatccaagaataaagccgactgaataacgtttaaaatactgtgtgattaacatttgcgtaggcgcgaccgtggcaaagctgaccaacccatagatcatcgcaaatagaaacaataaggcagggttatggctatttaataaaatgaacaacgcgaccgctctcgtcaaatacaacaacagcaaaaactttcggctgctaaagcggtccgcgacaacacctgacgctaaaatgccaatgacattaaatgctgctaaaatgctgaccgcggtgccggcaacttgggtggaaaacccatggttatgggaaaaaggaattaaatgtgtatccattaaccccgtagtcgtaaagccacaaatggcaaatggcagcaagacaagccaaaattcacgcttaacgatgacttgcttaaaagaaatgtctgctcttttgccttcttggctaatttctgcctcttcttgcctttctccgccaaccggcgccaatcctttttcacgggggtggttccgcaaaaataacatgatgattggaaagacgacgacgattaaaaacaagccaagtataacaaccgtcatccgccaatcagaccaatggattaatgacaaagagacgggcacaagaaccatttgcccggcgccaaagcctgtctccataatcccaaatgccaaccctcgcttttcgttaaaccagttcgtaatcacaaccgttgccgcaacattggaggcaccaccgacaccaagtgaaacgaacaagcaatacaagacaaacagttgccaaggttggtgaacaaaagcggttaaacaaatgctgatgccgacaatgagcgtgctgaatgagagaacaaggcgtgctccccatttgtctactagcttcccaataagaggttgggaaacgccgtatacaacgaaactcaatgtcgatataagcgatgttgtcccccgatcaagggcaaagtctttttcccacggttccacaaaagcgccaaatgaaaggcgtaatccttgaactgccagaaatgtcaaaaagataatgatgacaatcatccatgcgtaatgaacctttctgttcatcttctccccacctacctccgattccatcctactctcatttgaaagcacaaacgattttggctattttgcctgcctatcctctttatctctccttgagccattgcacgcaaagaaaacgcaactggctgcaaacagcctgatacgctctccaaaaattgcatgtgtagtcggcgttaatccagtagcttacttataaaaaagacggccaaaaacaagctggccggagactgaagacaaacatttacatacgttgttgtttgcctcgcttatctgtttatgaatacacgtcctgtcccatctacgctttccatgaaacgttttctattctatcagctagcaaccggtttttcacttaacgatgtcacaaattatttatgttcgataatgctatctgattgtttcatcattctattaaatcaactattgggacagcttgtaaagaacatttttatacttctttaaaatgacgtacggatttcggcaggaatatcttctagctggacttcttcccagctatcgacaaacgctttttttgtcttcaaccgcaaaaacgcccctttccgcaagtttttgtttgctttaaattcgactgtcctctcttggccttgttcgtcaaccccctgtatttcatacacgtagtcacccaattcatttttagtgccgtcttcatctatttctacgtacacatctgttactgctacaaatggatttactttcaacacgaccacattgtccttaaacaaaagccagccagcaatgattagaatggctcctatactgaaggcgatagctagtttgcgtttcaatggactcactctctttcttttttattcaattgtctcttttctctctttagagaaccattgatctgccttacaattcgcggcacctcacttacaattttgtcaccatctatataaatagcaaaaagccttcctaggataggaaagctcttttaaatgaggcaagacgcttaaaatgcagcatacgacgctttttaaacgctgtagtttttttgtaatgattaacaaaacacggtggcatcttagaatgactttaagtactcttaagatcagaggtctagtttttagccaagattgagtatactgttttcacaagcagcaattttttcttggctaaaacaaaaaataagaaaaaattttttttactgagatcaatagccctttaaaatagcaaaaagccttcctcgaataaggaaagctgctttaatggaccagacggtgcttgcgaaaggcggcaaaaaaccagatcacatttacaattatcgacaacaggctacaagctgctgctgcgactccagccgccgtgaaaaatgtcgagataagaaggagcacgactataatgaaatgaataaatatcccaaagcctgatagaatcgccaagatcgcttttgaaaacggcagtcctattcgatacaatccaaggggaacgatgtacattccagcaatcatggctacagcaagccacatgccaatactgttaaactcatttgctgcattcccatactctgctaatggcgtgagcgataggagtatcacttgcacacaaaacagcaacatcgacaacaacgcccatcttgtcacactacgcttttccatgtcttcccctctcttcctcttccagcttacaacgaaaacagctttcgttcatccgtctgcagtcggagaaaggagttccttgaacaagcaaaaaaagccaacaaaagcgtttcacccttgttggcaataatagctggtagcgagatgttattttcaaacttgccttgcattgcaagtagacgtgtttccaaactcaagagatgacttaatgacgattgtgcgtttctaagtagattcgcttttcaacaaacgaacgccaatgtttcaccgaaaagactatcggcactctccaagcaacttccatacgccccattctcctgttgttcctggttcttctcctgtcgtccaccatttcgcctcatataaatgtcctttatgctggacttggtctccgcctgtgtagacggccgtctgttcccagttaggagcagcacatgcctcaccgccattttctgctttcgtcgtcacgcttaaagcttgtccggtgtgccggctgccatcttcatattcagcagaaacagtaaatgtatacgccgtgcttggtttcaggttggtaatcgttagagacgtttcgtctgtcacttgttcctctgtgccgtattgaacgatataccgtgtcgctgcttcgtttaacggttcccacgaaagggtgatggatgtggatgtaacgtccacggcgcgaatatcgcgaggcgccaatgatggttcttcaggatgttgcccttttcccggcttaaagtccagttgctccgctaatgctgtaagcaatgttccatttcggtccccgcttacctcccaaaacatcgaacctgcgagatggttgtcttttataaaatcggtcttatgctggaaggattctacatcatcgtacgtaataaagccaccgtttgctgcattgtacaagaaaggaactttcgcaacatcgttccaatagcgttgatagccatttttgtttacataattgtcctcaaggtctgagaagtcaaatatgccattttcccacgttccttcttgagggggagagcaatgttgatactcgccataatttgcttcttcgcagttcatccagcctctcccataaaaaggcatccctaatacaagtttatttccaggtactcccgcctgtaaatggccctcgacagcgctttcaacattaaattgctcaggtgttggaagctctgaatcagctgtagcaggatcaaagtagagtggggcgttgtggccgctcgtattttgccaaccgccgttaaaatcataggtcataatgttgatccaatcgaccacttcagcaatttcggctagcttgttattttctacatattcagaactggctcccgaggcaattgtcactaagtactctttcccgtcctcttggcctgcctcgtttaatttgttgcgtacttcttgcaagagtaaaagatgattctccttatcttcaggacggcggctattgcctggaagccctccgcttactgggtattcccaatcaatatcgacgccgtcaaacccgtattgacggacaaaatcaaccgccgaatttgcaaagttttctcgtgtttcctttgttgcggcgacgtcagaaaaacggttcgaccatgaccatccgccaacagagatcaacgtttttaaatggggatgctcttctttcagtttttgcaactgcttaaagtttccccgtattggctcgtcccatgtatcgcctgggttcgacttttgtgcatcgatccaaggatcgcccataacaattgacccgttcggtacatcgatgacgccattttcatcttgacatgaccaagtttgcgggtttggactcgcagggtctggattgccatgcctgccatcccagcaaatgttggcaaatgcgtaattaatgtgacttactttcgaagcatcgatctcccaaacttgaaaatcgcgtccataggcgccccaagatggataataagcgacaattttgtaagggtcgtcatctgactttgttgcagcatttacttgtccgcctccatcagatacaaatagcaagatgacaacaaatagaggtgtgagcagttttctcaatcgtttccagtccattcgtactccccccagtccatttattaagtagcatcaactcaaaattgttactactaattcgatcataaaggtaatgacaataacaatcaatgtcattattataattttcgaaaaatagttctttttatctatattggacttgtaaattcattggttttgctagtttcatacaatcgtttttctatttcattatctgatttttagctgttactaccttttagacgtccgcaaatacatattcattagaaaatgttataataactgttgacataaaacgtcttagtcgtaccaactgaaaggagtaacaacattgaacgtgaataaaaaaggcactgaccagtcgctccatgctttcgttaaacaagagttagttaccgccattcaacaaggagtttatcccgttaaatcccagctgccaactgaggcagaactgtgcaagatgtatgatgttagccgaacgacgatccgaaatgcactacaacaacttgtcatcgatgggtatgtagaacgtatccaagggcggggcacctttgtcgccagcagaagggtgaagcaaacgttgtctgcaacgcaagggaattatcgagagcaattgcaattgcaaggaaaaaaaccaaaaatacaagtgattgatttgaaagtcgttccttctgatgaatttttgtctgccatgcttgaaatcgaggaaaatgagccgatccaccgcctagaacgaattcgttatgcagatgatgcccccttgcaatacgaaatcgcttatttgccttggcgcaagacgacttggctcacgaaagaagggggagaacactcactctatcaattactgcaaagccagccggacctctcgcttcaccagacaaaagaacatttgcatatcgccctcgcagatgaagaagtagccgcaaagctaaggatttcagttggcgacccttgcatacaaattgaaacacacgcttatttagcggatgagtctaaaatcgaatattcaatcgcgtatttccatggagaaaaagctagttttacgattgaacgaaattatcaaaaaccgactaagactggttaagtctgagtcggtttgttttttttgagcatgtgtcctaccgtttgttttacttgtgtcaaaactctaagctcccgggcacggtggtcaacataggaagaatatgttcttaacgtttcatctatgtatgctgggtggcacatcacttcaatggtgccatcataccctttgtattgttgggatagttcagcaaaatagtcctcgtttacgccttctttataaaagtttgtatcgagtagatcagaccagaagcgcaggccagcaggtgcttgtttaaatccggtccttacaggcaggtcatacgtttgtgcgaggtgcttgattattgggatgacaggctcccacgtatggatgtggtggtggctgtcaaggtgcgaaggcgtgatccctcttgtataaaattgttgaatttgtgcattccactccttctctacttcctccacgttgatctcatctgttgcttgccgaaattgactagtaagacgaaactcgccttgttggttgattaatgtagggcagtcggacgttaatggcgccccgcaagtcaacgttaaatgaacacccacttgcaaatcaggataacgatccattaattgaaaggcatggtctgttgcaggcatgtttgtaagcatagtcgttgatgtgacgatacctagttcatgggcgtccacgatcccgtaattgacaccgcgggatagtccaaaatcatctgcatttacaatcagcttcacggtatgatcctcctcttactccttgctttttccttctctatcataccacaaaattgtaatctcgtataaaaacaatgccaaaataggtagttacaaatttaagttgattagtaattacaaatgtgatatatatggtttagaggaagcgcttcctctgcaatcaagggaggagaaaacatgtcacttaaagtcgttatcatcggcggtgggtcgagttacacccctgaaattattgaaggatttattgaacggtatgaacgagtgcccattagtgaaatcgttcttgtcgatattgaggctggcgcaaaaaaattagcgattgttgaagcgctatcaaaacgaatgatcgaaaaatcaggctatcccatccacgtacgcagctcatttaaccggcaacacgctttagagaacgctgactttgttacaacgcaaatacgagtaggcgggttggaggcaagagaaaaggacgaacgaattccattagagcatgggctagtcggccaagaaacgaatggcgcaggtggcatatttaaagcgtttcgcacgattcccgttttgcttgagattgccgatgacattcataggatttgcccgcaagcgtggatgattaattttaccaacccagcaggcatcgtgacggaggcgttgctccaccatagcctccataaaaaagtaatcggcgtatgcaacattccattcaatatgaaaactggaattgcagagatgttctcctgccctgtagagcaagtggagatcgagtttatggggatgaatcattttgtctttggaaagcgtgtctttattcgcggcgaagaccgcaccaacgaagcattagcaaaactcacggcggacaatgtccattactctcctgcaaatattgtctctcttggatggtctaaggagtttgttcgggcactacaacttcttccaaacccgtatcatatgtattatttccaaacggaggatgtgctgaaaagggatcttgcagcgtttaaagagcatgggacacgagcgcaaatcgtcaagcaagttgaagaatcactttttgttacttatgaaaatccagcattagctgaaaagccaaaagaactggaacagcgtggcggggcttattacagcgaagcggcgtgcaatttagtagaaagtctttatacgaataaacaagatattcaaacagtgaatacacgtaataacggtagtatccgagatttgcctgatgatgcagtcgttgaaatcaatgctgtcattacgaaagaaggccctaggcctcttgctgtagggaacatccctctacaagtcaaaggaatcatctcgcaaatgaaagcgttcgaacagctcgtcattaaagctgcattgtccggcgattatgacgatgcgtacaatgcacttgttatgaacccactcgttgccgacgagaaaaaagccacggccattttagacaaactgcttgaagcccataaagaccacttaccacaattttatcgtaaaggagttgttagccaatgaatccagtgatgcagtggatggagaaacattttattccgatcgcgggacggatcggttcacaacgtcacttagttgcgattcgcgacggttttgtcgcgatcatgccgttaatcattattggctcatttgctgtcttgattaacaatttgcccattgcgtttttccaaaactttatggccgatctgttcggcgaaagctggacaacgcttggcggcaacatctgggatgggtcgtttgcgatcctttcattgcttgttgtcgcaggaattagttacaatttagctaagtcttatgatgtcgatgctctgtctgctgcacttcttgctgttggctgctatatcattctgacgccaacgaccgatgattggggcctttcctatgcctggacgggagcgcaaggtctgtttgtcggtgtattaacggctgttcttgtaacggaacttttcaggcttttgtatcactcaaaattcaccattaacatgcctgaaggcgtcccgactggcgttgttaaatccttccgggcccttataccagctgctgtcactctcattgtcgtctccagcctgcaaatgttgattacagcgctaacagacggcagcattcacgaactcgtctttgccgtcattcaacaaccattgcaagcattaggaaatacgctacctgccgcatttattattacctttttgaatcaactgctttggttcttcggtttgcacggcacgaacatcttaggacccatcatcgattcgatctaccttcctttgctcgaagagaacattcgtctatttgcagaaggcactagtgcatccgatgtcccttacattgtaacgaaaccatttttagatgcctatgtgtttatgggcggatcaggtacgacacttgccttaatagccgctatctttcttgtaaacgcgtccaaacattatcgaacgattgggaaattatcagcgccagcaggggtgtttaatattaatgagcccgtcctattcggcttgcctgtcgtgctaaatcccgtgatgctcatcccatttttaacggttcccgtacttttaacactcacgtcctatctcgctattgccagcggacttgtgccaaggactgttgcgcttgtcccgtggacgacgccgccattcattagcggctatttggtgacaggtgggtcatttgctggcgttgtgctccagctttttaacatcacacttgcgactattttttatattccatttataaaagcagcaatgagagccgaacaaaagaattttgatgacaaaggagatactggcgatgacggcacaacaaaagcctcttgaggaaatttcgtttcaaatcatccttcattcaggaaacgcccgttcatttgcgatggagggagtccagctagcgaaaaaaggagaatttgcagcagcgcacgaacgtctcgaacaagcagacaacgaattctaccaagcccaccatgcacaaacgaatttgctgcaaagcgaggctagaggcgatcaagttgccccttctcttttgttaatccacgcccaagaccatttaatgacatcaatgacaacgaaagagctttgcttggaaatcattgaactacacgaaaaatttgctgaggagcgtcgttaatatgaatattttactcgtttgctctgctggaatgtcaacaagcatgcttgttgatagaatgaaaaaagcagctgaagaattagaagtacacgccacaattacggcaacggctgaagcagggttggctaatgagctagacacgacaaacgtcattttaattggaccgcaagtacgctatttggaaaacaaaattaccaaaaaggcagaaccccatggcattaaagtcgctgttatcgattcaattgcttatgggacgatggatggaaaaaaagtgctgcaacaagcattggctttatgaacgttgccgacaccatcatcgagcgcgtttgtttaaccacgacgccaaaccgagtaaagtctaaatcgaacagggaaaggaacgtttagcgaaagtcaggcttgccacggataaaggtggcaagttttattttcaccccgttaggaactggcgtttacttttgcaaagcccggttggtttctactaaaaaggaaccaatcggtttatcattgactacataatcggcgattgtatctaatggggtaaaatcgtggtttacaatgatgagctttgccccgtgttctttcgctattcttggaaaaagattagctggtgatacaactagggacgaacctagcacgatgaaaacatctgcctctatcgaatgctgctccgctaaagcaagtatgtttgaatcgagcggttctccgaataagacaacagacggacgaataaacccaccgcaggaacagcttggttggttattcatgtagcggtcaacgtcgtagtgttgaccgcattgaatgcagtatagcttttgaatcgatccatggagtgggagtaccctctgatttcccgctcgttcgtgtaggccgtctgtattttgggtaatgatcgcggtgaccgatagctgctgttcccatgtggccaacacatcgtagcctttatgaggttgtacatgctgaagttgctccatgcgccgccgataaaagtcaacaaacgcttcgcgattatcgttcattgcttgtaaactcgccaatgcctctgggttgttccctttccacaaacctcggctcgagcgaaaatcagggacaccgctttctgtactcatacctgctccggtgaagacgacaattctctgcgcttggcgtaacgatgttgtgaacaagtgaccacctccatactgagaatgttcatcgtctccataggttgtcctacccttttattcagaccaaagattgttggtcaaacactggctttttgtttttccatgaattgctccatgtatgtaatcacttgatctaaaggaaccgaaattccttgggctggaatgttgattggcgcttcaaatccttgattcatacgcatcgccatttgtttaaaccctttttgtttggctaacacacgatctatgtctttcggaacaataccgagaaaatgttgccctaatacagagtaaatgaagtaccgatctacttcctcccagcgaataagccctgccccggccgctgatgcattgtctataatcccttcttggttaatgtgcaacgaaggctttggcttcaatacacggtataaaagatagataaagcaaagaccaaaaaagacaatggctacaggcgcgacaatcggaaaaagcgtctcaaagattcccgcgcttccttgtaccaaactttcctggttcatcgccaaaacagccgtcaatgccgtaagcagaaaggcaagtgtacataataaggccaatttaaccggattcggataaataatgacttgattctcttcgactattactttcttagacatactccacttctcccttttttgaaagatcaatcgctcgaacgagcaatgttggccaacgcttcatttcttgacccgtcaaggtagcgattcggccatttttattttatcccattgtttgccaacatggaagagcttcaattgtatagtttttaacgaaaggggcatgtttccctttccttctcccccataggactcgtcgcccccctcaccatagactgagcgaacgtttgatgataagatgacagcgaacaacgcgtataaaaggagcacacgttaagtggatcgattggaaaaataccagactggcattttgtttattgcggtcattgttggcgtctgcctcggccagatcgcccctattgcccaaagcgcagaaatgcttattcttccgttcttactgttaatgttatatggtctttttttaaacattccgttaaaacaaataaagcagtccttccaacataagcgctttttttgggcaagcctccttcttaattttgtctggacgccacttctcgcttgggggcttggagccgtctttctcaacgatcatccagctttatggctcggttttattttattgttggtcacaccttgcacggactggtacctcgtttttacagctatggccaaaggaaatgttccgctagctgcttcgttattgcctgttaacttgcttttgcagttgctgcttttgccgctctatttgctactttttggcggaactacagagctgccttcccttcagtcagctgcccaaggcgcaatgggcgttttggtgattccgtttgcattggcttatgggacaaggggagtattaaaaaaacgaaaacgatttttagaacaaaaacttgctccgttcttttcttccgcccagctgctctttctggcattggcggttatggcattgtttgcttctcaaagccagagtctatttcagcacgcttcgcacttattaagcttgctgctgccgatttttcttttctttatcattaacttttgcatagccctagcaactggaaaatggctttcattctcttataaggacacagctagcctacagctcactgttctggcccgcaattcgccacttgctctagctgtagtcgttgccgcttttcctggtgaacctttcattgcccttgccctcgtcattggccctttgcttgagttgccgatccttgcgctcgtagcctatgcgttgttgtatataaagaagcggacccatgttttcatctaagcgtagctcttatggcagcattctaagatgagttcgtccccctgctagcatgcagcgtttcatgcctgctgctttttccacgttacaaagcctaccgactttttacgagatcgataggccttgttttttatttggttggcattgattatagatcgacaagcgttaaccagtttgcagcgccttttcgaccaaaaacactatgtgccgttgaccaatataccaatccgtcccatgtcgccaagaaatatcggtccaacggaaaacatatatgcatcactgcagttttttatccgctgactgcgccgccgaataccgtagccccgtgctgaacaaaacaaacacggcaatgatggcgataagtacgccgagtaccccgaaccaagtaatggatgccaaagaaatacggttaacgatcagcccacccattcctgcgccaacagccatggaaagctgcatcatggaactgttcaagctcaacattactcctgaggattcaggaacaagcgagaccaggttaaattgctgcgcaggtgcggatgaccaggcggcaaaagaccagaggatcaaaatggcaaatacggcgatgaccgattgcccgactaaggctagcaaaagcaacgaaatgacgtgaagcaccatccctgaaataagcgtgaatttgatgccacgtttatccgtactgtagccaccgacttttgaaccaattaaactggcaatgccgaacacaaacagagctgcacttatcaatgattcatttatatgagtcacctctagcagaaaaggggtgatgtaagtataggcgagggaatatcctcccaaccagaagaacgtaatcgctaaagctaccagaacctgaggtttttttaacaaagcaaattggttgattagtggaacaggtttgtcgcccttcatacgtggaaaaactgcagctatgacaagcatggagatggccccgacaattgcgatgaccaaaaatatcgctttccagccaaaagccgaggctaccattctgccgagcgggacgccgatgatgagcgatgcggtcatgcccatagtaacgttagcgatggcgctggcctgcttgccggacggagcgattttgacggcgatgctgagcgcgttaacggtgactaccccggcgcctattgccgtaatggttctcgcggcaatgaaaagaccgaagccggaaaatatatatgtcagcaaatttgcggcaataaagagacctagcgaataaagaaggagcttgcgccggtccatcttggccgtcagcgccatcaatataggtgtaacgaccgcataggccagggaataaaccgtaataagctggcctgctgtcgcaacgcttattcctaacgtctctgcgatccggtctaatatcccagaaatgacgtaattggatgttccaactaaaaagctaatcaaggctagaacgtaaactttccatgcgctcttcatcattcactctcccgatgtattttaaataaccatttttccaaattaccccttaaacattttgttaaagaaaggtgcatcatcgactgccggcctcgtcgtcggatgaccggacttcgccgccttttgcgcggcaacaagcatgagtggcaccgatactagcacgttatgactctccaatcttccagtaccacaatgacagccgaagcctcaatctcttgtttgtgaaaccaacatgtttccctcctccttcgtatcaatacaacatttgttgcttgaacaacattcgttgtattcatatgttataattccaaccagatagtgagcaatcatcaatagccatgaaccgttgtataaacaacaccctttctataatgtcgttttattgggggagattttaacaatgacaactaaaaagaacgaagctgatcctcgtgtgatacgtacacggcgacttcttcaagacgcttttgcttcattaattcaagaaaaagattttgaatcgatcaccgttaaagatatagcagagcgggctactgttaacagagcaacgttttatgcgcacttcatagataaattcgaaattcttgaggctagactaatggaatcatttatgacaatcataaatcgtagaatttgcggtcacgaagtattaaatgaagaaaccatccagagcatctttctgggtgtatgcgattttcacaaggatctaagcgctatgtgcaaaagaaggaatgcatcgctcggagctgtatttgaaactcaaataaaggaaaaaatccaaacgatacttctttcctttatagacaaagacaagatgctatcaagttcaaacgcgcaattcttaatcaatacagcttctattatgttaagttgggggatgtatggattggcttacgtttggaacaaggaggggcgtcaaataagtgcggaatcattcgttaaacaaagtatgcccttagtaatgaatggagccaaagcactgctggaataggtcctgtcgctattgctgtggaagaaacaagatgcatacaaaaaagacccactcccacgcgaagtgatcgtgcccaccatatgatttataaacacaggtatagtatgatagattggctgctacctctttcttgtttagctaaaatcgatcatactgaaatagaaacgaagaacacacatatacttgcatgagagaatgatgaagcggagtggtctgaatgaaactgattataggaatgacaggggctacaggggccatttttggcatacgtttgctccagcaactacaaaaaacagaagtggagtcccatttggtgatgtcgccatgggctgctgctacgatccaagccgagacgtcttttaccgtaaaagatgttgaacggcttgccgattatacgtattcgcctaaagatttaggcgcagcggtttcaagcggctcttttcaagtcgatggcatgatgatcgccccgtgcagcatgaagacgctcgcttcaattcggacaggcctcgcagacaacctggttacacgggccgctgatgtgatgttaaaagaacgaaaaccgctattattaatgacacgggaaacgccacttaatgatatacatttagaaaacatgctggctttgtcgcgaatgggggctcatatcgtcccgccaatgcccgctttttataaccagccgcaaacgattgatgatcttgttgaccatatcgtttaccgcgctcttgaccaatttggcatacacttgcctgaagcaaaacgctggcaaggattaaaagcagagcgccgcgatcctggtttttaggtgaactacatgtaaaaggagctgacactggatgtcagctcctcttttttttaggcatacccttaaacgcctgaatacgccatgaatcctccatctacggggatcgtaacgcctgttacaaaccgcgaagcgtcttcgtcagcaagccacaaaagtgttccgagcaaatcttctggtttgccaaaacggcgctgcggtgtgtgagcgattattttttctgcccgctccgttaatgaaccgtctgaatttgttaataaagcgcggttttgctcggtcagaaagaagcctggggcgatggcattggcgcgaatgcctgagtcagcaaaatgaacggcaagccactgggtaaagttgttaatgcctgcttttgcagcgctataggctgggacttttgtcatcggtgatggagcggacatggatgaaatattgatcaccgaaccgccgcggccgagcatttgtttagcaaaggcttgcgtcggaatgacggtaccttgcaaatttaatcgaaaaacggaatcaaacccatttggcgacaaatcaaaaaacgattttgctgattcgttttccaaatcgccttcctcataagtctccttatccgtaatggcgtcggggtggtttccgccagcaccatttataagcaaatcacaagggccaaattcttccttgaccgtagacgccgcttgttggacttgttcttccttaagcacatcacacgctagcgcaatcgcctttccaccttgttctttaatttcctcggcaactgcctcgcctttttcttttgttcggttgaggatcgcgactttcataccatgtgcagcaagctcttttgccatttcccggcaaagaataccgcttccgccagtcacaaccgcgactttcccttttaaagacgcatgcccaactgccattacgattgcctcctttttgcttcaagctcatacgcatcccaaagtccccataaatgcatgatgccaagagcacggtcatagaggccatagcctggacggcatttttcattccaaatatggcggccgtggtcagggcgcacataaccagtaaagccattttcatggtaggctttgacgacatcagcaatattaacagaaccgtcttgtgaacgatgagatgtttcgataaaatcgccattttcatagattttgacattgcggatatgagcaaatggaatccggtcgtggaaacggcgaataattttcggaatatcgttttctgggtttgcaccaagagaaccgctgcatagcgtgatgccatgggctgggctgtttgacagttgcagaaaacgctcaacggcggcctcacttgttatgatgcgcggcaagccaaacacagaccatggtggatcgtcaggatggatcgccatttgaatgccatgttcctcggcaactggaagtacttgctctaagaaatactgcaaatgctcccataaatcgtcttctgtcacattttcgtaagctttgagcgatttttcaatatgggccaaacgctctggctcccagccaggcatcgtaaaggccgcgttgcttgtcgtttgtcgaaccaattcgcggggatccatgttgtccacttttgctttttcatagaaaagagcggtagacccgtcttccatttctttaaacaaatctgtgcgtgtccaatcaaacacaggcataaagttgtagcaaatcaccttcgcaccgaccttggcgacgttgcgaatgctttccttataattctcaatgtatgcatcgcgcgtcggcaagcctagtttaatatcttcatggacgttaatgctttcaaccacatctaaatgaaacccataacggtcggcctgttcctttacttgcatgatgtcttccaaaggccatacttcgccagccactttatcgtgcaacgcccaaacaagcccttctactccagggatttgtttgatttgctccagtgttacgctgtcgttgttttctccgtaccacctaaatgtcattctcacttgctctcatcctctctttcaaagattaacactgctttacggacatgagcaggctccttttcaagcaactcaattgccttcttcacctcatcaaagtcaaaacgatgagatataatcgaggctgggtcaaccttttgctcatttacttgcctaataacgtcgggaaattggtttgtttgcagccttgagcctgctacagttaattcttttttcgttaacaacaaagacggaatatccgagggcgtttcattgaatcctaatgtcactacggttccagcaactgaagcaagcttaacggcttcagcaaatgtggtattcgtaccgactgcgtcaatgacaacattcgcgaattcgccatcggttttttcaaataggactgcttccggcttttcatgcggcaaatgaatcgtaaaatcagcgcctacttgtttggcataatcgagtcggttggcttgtaaatcagaaatgaaaaccgttgcgcctttttgcttcgccatgattaaacaggcgatgcccgtcggccctgcccccatgataaaaacagtgtctccaggctcaatgtttccacgatatgccgcctgggcgccgattgtcattggttcgacaagagcagctgcttcaaaaggcaaatccccgtttactttgtgccagttcgcttcaggagcgaccatccattcacgcatccccccatcacggtgtacgccaaacacttccaactttgcgcaaacattcgggcggcctttcttgcaagcgtagcatacgccgcatgatgaaatgggctcaagcgctacacggtcgccccgacgaaggccatggacaccgctccccacttcttcaacaatgcctccgacttcatggccgataatgcgcggataaaccgtaaacgggttactgccatggtaaatgtgcatgtccgacccacatatccctacagcttgcactttaaccagcacatccttgtccgtttcaagctctggcttctggacttcaactacgtgaatgtcccctggctttcttacttcaattgctcgcaaatgcgccacttccctttccattagtttggcgttttcatgaatccgcttacaggataggctgtaaaaatacgaaataagatgatgccaatgtagcctgcacacaatgtggaatacgattctaccatactaccatacaagtgtggtagtcaagagatttgttactcatgagacgaaaaatggggagaaattgttttttcaataaaagcattaaaaagcgattgactaacgtttttataatggctagcactgtcagatgcgcgaagggataattggctctattacacccttttaccgtggtaatcttcgtaaatagcctgcgggaacaaacaacatgtgcattcccttcaagactcctttgaaataggcgatttgctgatcgtactcttgagaagaaacaaacaaagactagggactcgagtctcctagtcttgtttgttcttgttataagaagcattatgatttcgaggataacggttttgttcgattgcaaaaggtagctgcttgttctccagcaagccgcccaaacacagcgcctgccattaaaccagaaccaccaggatagttatggtaaaacagcccgccaaccatttctccggctgcaaacaagccagcaattgggcgtttatcatcgccgagaatttcgctttctgtgctgacgtgtatgccgccaaacgtaaatgtaataccgcatgttaccggaaatgcataaaatggcgctttttcaaaagttagcgcccagtttgatttaggcggacacactccttttgtacatttcccgtcttttatcgctggattgtacggccccggttggactgcctggttatatgcacggatcgtatttactaacgactcaggacagacgcccattttctctgctaattcctccacgctatctgctttgtaacaggttgcttctggcaggtggtattccttgcggaggttagggctcacttgtgcatcgaataattgaaatgctttttgctcaggctgcttcaatgtttcttttccatactttgcatacgtgtaattgcgaaaatcggctccttcatctacaaacctttctccttttacatttacaatcaaccctaacggataagatgattttttataaatgtcccctggcttgttaaaatcgcctgtctttggggcatgataatcggtcgtatgggcgtggcagccatcccattgtccatatcggacggccccagctttcagggcgagtgttaacccttcgcctgtgttaaaggctgtgccacggacgactgctttttcccattcattccctaggtgggtcttgcgcatgttggcattggcttcaaatcctccgcaggcgaaaatgacagcattggctgtgatttcaacaggttctcccgctatttcaacaattagcttttttaattggtcttcttgttttaacgctgttgtctttgcgtcgtacttgatgtcgatgccaagtgcttcggcacgctgaaacaaagcttgaaccagccccactcctttgtttttcgtttttaacggcagccctccccaaaactggcgcgtcccgtctttctcataatattggttctcattgactgtaaattgcacgccttgtttcatcatccattgaatcgtatcaaaagaacgcgacacgagctggtttgctaatttttgatctgtcagaccgtccgttaaacgcaacaggtcggccataaacgcttcttctccatagtcaggcatgctgatttgctggatctgctcctcatccaaatccgggagaacagcccgtaaatcttgaaaacgaccatatgcacaacgaatggccccgtcggtaaaatacgaatttccgcctctcttgctctttggcgcccgttccaacatacatacgctggccccttgctcttttgcagcaatcgctgcacaaagggcggcatttcctgtccctaacacaaccacatcgacgtctgtttttttcatactcattccgcctcctcgatcttctcgcaaacaacatctgtaaattgctgtgtgcttgctgttccgcctagatccttggtacatactccacttgccaatgtgtcggcaaccccttggttaattcgtctctcgacagtgctgcataattggcttttatgttttttgccaatccaacctaacaacattgcactggaacgaatcattccaatcggattggccaaacctaggccagcaatatcaggcgctgagccgtgtgccgcttgtgccattgctttgctttcacttgcattgatcgagccggcaagccctaaacttccaacaagttctccagtaagatccgataaaatatcgccgaacatattttctgcaacaatgacatcaaactcagcagcgcgcctaaccaaatgggcacacatggcatcgatgtggtaatcatcaacagacacatctggatagtggtggccgacctctttgcaaacgtttaaaaacaaaccagatcctagggaaatcacattcgccttatggacaattgacactttttttcgtcgttcccgagcagcacgaaacgcagcatgggcaatacgttcaatcgctttgcgcgtaaagacaccggctgttacagcaacgtctgctgttaccatccattcgccgattcctttatacatattgcggtcaacataaaacccttctgtattttctctgtatataaccaaatctgcgcgttccaccactccttttacatacggctccgacttagctggcctaatgttggcatacaaatcgaaatggtgccgcaattctccgcttgggttgcgtacgttttgtagctgttttgggtacgactgtgaatcatgggggcccattagccacccatcgagtttgtcgagtgcttgtaccgtctccgctggcatgcttgaacctgtctgtttgattgcgtccagtcccattggcaacacatgccagtcaatagccaaacctgattttgcggcggcagcgcttacaatttttacagaagcacttacgatttcatagccgattccatccccgtataatacgcctagctctaatggctccatggcaccctccttaacaagacttacctttaggctactaggaaaatgttatagagggaaatattgattttctttgacatttcataaaaattttttatgatcgctcttgttgccactggcagatgtaatcgataaaatgccttacgactgccagctttgctgcctccctgctcgctaatagccatgtccgacgcaaaagtggcgacccgtccaaatagtagagtggctctatgtaaagctggtctttttctgaaagggaaattcccggcacaatcgcgtagcctagcccgtgtttgaccatttccttgcatgtttcaaaccgatctaaatccatttccgtgtatggtggctcctcaaatcggtcgttccaccaatgctgaatcgtatctttaagtgaactgtctgtccggtaacttaaatacggcttctcaggcaatgtacctagttcaagcttttccttcgaaatgagcgccagctgttcttcccccagtagatgcttttctcctggccatgtaaagtcacttcgcaaaatgccgacatgaacagaagcactttgtaaatgttctaatacttgcgtactccaccctgtccggacttggaaacgaacattgggatagtggcttgaaaaccctttgagcacttttggcagtaagtattgggcataattgctcgatgcaccaatgcgaagcgttccgcttacatgcttttgcatatgcagcaactggtcttttgtttgttggattttctctagcatttcatttgcgcattctgcaagatattctccttctgccgtaaacccgatcccctttttcgttttgaaaaacaactccacttgaaattcttgttccattcgttttaatcggtaactcaaggatggctgtgaaacaaatagcttttctgctgtcttggttaaatttttgtatttatacagcgcgttaattaactcccaatctttttggtccattatgggccccccttgccgtttttgtgtgcctattatacatgattattaaaaatatttatcggattttatagaattctactattttacttatgttttgcaatcgcttacaattcgattcaagacattgcaaaagaggtgaaagaatgagaaaaacgtttgggctcgtaatagcttattctgtattattgtttgcagctgcaggctgtaatacgattcaagcaaatgacaagcaggcggacaacgaaggaagcgaaggcgcactctatgaaaatgaagtcatttcgtttgttgtcccctaccaggccggcggtggttccgatgtatttgcccgctttatggccaactactttcctaaacatattgaaggctccccacgggttcaagtggaaaatattcctggaggaggcagcatcacagggaccaatgaatatgcactttcgcggcaagcgaatggacgaaatattttaacaacaagtgcttccacccatattccgtatattctccaacagccgtctgtcaaatacgacttgtcgaaaatgacgccaatcattggcgctcctacaggtggcgttgtctacacttctcccgaattagcggcattaggaatggacgatctttcaaaacagcaaggggcgcttttctatgccggcatttctccaactgggttggaccttgtgacgctattgtcgtttgaagtccttggccttgacgtcaaggctgtgcttggctatgaaggcaaggggccagcccgtgtcgcctttgaacagggggaaagcaacattgactaccaaacaacaacggcctataaacggaatgtcatccctttagtcgaagaaggcagcgctgtccccctctacagccttggacaaatgaatgaagacggtgatttggttagagatccccagtttcctgacctgcccacgattgaagaaatccattacgacctatacgggacagcaccagtcggcgaagcatgggaagcctataaacaatttgtaggtgcttcctttacgatgcaaaaagtcatttggatccatgaagacgcaccagaacagcatcaacaacttttacaagcatcgatggaaacacttatccaggacgaacaattcatggcccaatcagaggaaattttggaaaattatcagcctttggtcggtgacgagctgcaaacaagaattgattcgatgttaacgatgtcccctgagacattagaatgggtttcccaatttcttttagatacctacgatgtagatattactaaactttgatttaatgggaatgcttgctctatctattcaactttcttttgaaacgacaccatccataaaaaggaggcgactgctatgctcgaagctgcatgggaagcattgcttatcgtgttgcacccatctagaatcggcttcatgtttcttggcatatttattggtatttttgtaggacttctcccaggtttaagcggaacggtaggcatgtccttgctgctgccctttgtgtttggcctcgacccatttgtcggcatggccttgctgattggcatggttgctgtcgtccatacgggcgatacattcccgtcaatcttgcttggcattcccggcacttcagggtcccaagcaacgatcatggacggttttcctttagctaaacaagggcaagcctcccgggctatgggagcctcattcttttgttccatggtaggtggtgtcattggcggccttgccctttatttaacgatcccgttcgcccgcccgcttatctctgcttttagttcaccagagttatttatgttgacgatgctaggacttagcatggctgggctgcttgctggcaaatcgccgatgaaagggattatatcaggactgctcggcttgctgattggctcaatcggcagcgccccagctgtcgcagaataccgctacacatttggatcactttatttatcaaacggcgtctctttgcctgtcgtggcattagcgatcttcgctttcccgattatgatcacgatgttgaccaacaaaggcgctgtttctaaccatggccctttaaaaagaggcgttttaacaggggttatggacgcgctgcgcaacaaattccttgtatttcgcagcgctgttatcggcacgttgattggttttgttccaggacttggaggcagtgttgttgactggattgcttatggcgctgcccaaaaaacagttaaaggaaattcatttggaaaaggcgacattcgcggcgtcattgctccagagagcgccaacaacgccaaagaaggcggctcccttgtgccaacgcttttatttggcatccctggctctgggacaacagcgatcttgctaggcgggcttaccttaatgggcttagaagcaggaccaagaatgcttggcgccgatttgccggtaacgttatcgattgtatggacgctcgtttttgccaatatttttggcgcactgctgtgcatgctgcttatccggccaatctccaagattagcatggtgcctggagaaaaaattgtcccgtttctcatcgtcctgcttgtactaggcgcttaccaatcaaacttctcatggggcgatcttattgttttcgtcgccattggcctcctaggctacgtgatgacgattctagattggccacgcccgccgctcttaattgggtttgtccttgctttgagtgctgaacgctattattggatatcgattgagcggtacggttggtcgtggattagcaatccacttgtcattgcccttgctctatttattgttctattgttgtcaggcggggcaattatgaaaaagtttagtaaatccgttgagtcaggaaaaggggtctcctcatgacaaaagacttacttaatattggttttactagtttcttgatgcttgtttttggatttgctgtttttggagctttgcaattttcacggttggcacagttttttccactgtatgtttcaattgccggaaccgtttgtacagcgatttacttagttgttttaattatccgttatcgaaaagaaaacgcatcaagttcaagggcggtcgtttccatcgcccggccactacgctatatggcgtggcttcttggctacattgcgttcatttatcttgtaggcatgttgattgccacttcgctgtttctcgtcgctttcttgatgtttgaatcgaaaatgccatttatcaagactgccctttctgtcgcaatcgtactgatcgggatttcagccgctagctccctgctcggtgtttactggccgactaacttgcttgggctgtaaaaaagaacaataaccattaggagtgaaaaagatgagagaatatgaacgcatacgcgctgccattattcgcggcggcacaagtaaaggtgtctttattttacaaaacgagctgccagaagaccctaacgtacgcgaccaagtcatcctgtccatctatgggcaggatgcacggcaaattgacggccttggcggagcagacgccttaacaagcaagtttgcgatggtccgtccgtctcctttgtcagcagctgacattgaatatacattcggccaagtggggattggcactggccatatcgattacaataccaattgcgggaacatccttagcggcgttggaccgtttgccgtcgacgaagggcttgtttgcgtgacagaaccctatacaaaagttcgtatccataacaccaatacagatcggatcatcatcgcccatgtgcccgtagaaaacggacgcgccaagcaagtggggaactttcatattgacggcgtccccggcggcggtgctaaaattatgcttgattttcaaaacgctgctggagcaaaaacaggtgccctgtttccaacaggcgcacgaaaagattggcttgattgctcgcatggcaaaatagaaacgagcattgtcgatgttactacgccagtggcttttataaacgcttctgcagtaggaatgacaggagtagaacttcctgagcagctgactcaagagcaactgtttctgcttgaggaaatacggggagcagcggcaacgaaattaggttttgtcgcccaaccgtcagacgctgcccacttgacacctgcaagcccgaaattaatcatcgtttctgaagcacaagaataccaagcagctgccggacagtctgttcataaggcaaatattgctttcgttggccgagcaatgtcgatgcaacagatgcataaaacatttcctgtcacaggcgggctgtgcacggctgttgcttctaaactacagggcactgtcgtccacgactgctgttctgatcatgctcaaatggaggaaaccgtccgtgtgggacacccttctggcacaatggagtttcatgtgtccgtcaaagaagcaaacggcatcgaaccaacgattgaaaaagcagctgtcgccaggacagcacggcgtataatggaaggatttgcgtacgcaccagctgctttgttttgggggcactgatctgtaaagggatttagagataaatagacgctgaagcaaatcaattagacaaatcacatcatctctcccccatgagggagagaacactactccaacaaagataacggcaagcaatcaagcacctaaagcattacgctttgggtgctttccctttcatttgagctttttacccacttgacaattagccccttctcatatatggttaactacataaccaactaaccaaataacaaactcctactgcccatcttcatgctctctaccattccaagaaaggaggggtcacatgaaatcttcactggatgaaaacaaacctatctttcaacaaatacgggagatgattgaagatgacattgtgaatggcacactgacagaagaagcacaagtcccgtcaacgaaccagctagtggctgcttatcaaatcaatccagcaacggttttaaaaggatttaaccaattggttgacaatggcattttgtacaagaaaagaggcgttggcatgttcgtcaaaagcggagctagaagcacgcttattaaaaagcgaaaacaggcgtttaaagaaagttatgtccgcagcatgctgcaagaagcacgaaaacttggcattactgacggagagttacaagaaatgattaagtcgataggaggcgaaatagaatgattgaccctgtgattgaagcgaaacagctgacgctacgtctttcggacaaaacgattattgacaatgtctcgtttacacttgaacagaacaaaatctatggattgcttggtcggaatggcgcgggaaaaacgacgctattgtccttattggcgggattccgaaacccgacaagtggagcgattactgtgaatggcgaggacgtgtttgagaacagagcagttgttgagaacatcagctttattcgcgatgtcaaaatggattcagattcagatcgattagaagattatttaaaaggcgttgccctctttcgtccccattttgattgggaatatgcaatgacgcttgtagaacggtttaaactgcctattgattcgccaatgaataaattgtcacgggggatgcagtctgccgcccatgtcatcatcggactagcaagccgggcacccattacgatatttgacgaagcttatttagggatggacgcgccagctcgggatattttctataaagaagtactcaatgaatatatggaacgtccgaggacgatcatcctgtccacacaccttatttccgaagtagcttcgatgctagaagacgttctcattcttcatcaaggttccctcatgctccatgatcgtacagagtcattgttgtcgaggggaacgacgattacgggcgatgccgcagcagttgatggatttacacgagaaaagaaagtactaaatgaacagatactaggacagacaaagtcggcaatggtctatggagagttaactgaaacagagcgattacaggccgaacgacaaggtttgcaaattggcccagttgctttgcaagaactatttatccatttgacaggggagaagcataatgaataaaagcacacttgttgctaaggcgacattgcatacgtttgtgaaatggagtaaatggtatacggcaatgtttattggcatctttctcgttattgtcgttttgctcaatcatctatcaacctatgactggtcccttctgcaaggctatttgcaatcaacgcggattttctttttgattcttggtttgatgtctatgaggggcttcttagaatattttgtatcgaacggcgttacgcgcaaagactactttaaaggcatggcgtcagccagcgcgcgcttggccattgttatgaccatagctggacttatcttgtacggcctggaacggctcgtctacttcgttgccggttgggaactcagtcatacgtggccctttatggaacaatcgcttttcatccaaactgtagcgatgctttcgacttttttcctgttctacttgttaggttggttcattagcgccgggtactataaatttaacccttatgctggttttggcatggtcatgctttgtgttgcagtcgtcattgtccacaatcgcttttggggcttagacgtgccagatcccgtggttacttggagcgatggcctcgcgtcttctccctttttgtcgattcttctcactgcagcgttcattgctggtttgctatggttgctgcggcagatgacgaaaaatatggaaatcaccgcttgacttctctctggcataaaaagaagccgccactaagctcagtgcttatggcagcttctctttttattgatggaaatcggttcccgactcgactgcttttacatagcctttgcggatgacaaaatcgccaaaatgctcgccttcttctcgttctttcgcataagcaaataggatcggttccaatgtttctaaaatttccgcctcgccgatattttctttgtacattttgctcaagcgttccccagcaaatcccccgccaagataaaggttatacttacctggcgctttaccaataaaaccgatttcggctaatgcagcacgtgagcagccattaggacagccagccatgcggatgacgatgtcttcttcgcggatgcccgcttcatcgaggataaattccagtttatcaatgagcgaaggcaaataccgttctgattcagccattgctaagccacatgtcggaaaagcaacgcaagccatcgagtttcggcgcaatgctgagacatgttggccgtctgtcagccgataggtttcgacaatggcttgaatcgcttttttcttcgcggccgttatgttgctaatgatcacattttgattgccagtcaaacgaaattctcctgtatgaattttagcaatctcgcgcaagccagtcattagttggtaatcgtctgtatcttgaatccggccattttggataaataacgtcaagtgccaacgcccttttactcctttcgtccagccatagcgatcaccgttatgatcaaactgaaaggggcgtgcttctcctagctcccagccaaggcgtgcgtgcaactcgttttttaaccagtctaagccacggcgatcaatcgtgtacttaaatcgggcatacttccgaacggaacggttgccataatcccgttgaatcgtaatcaatttttcagcaacatccatgatttgctgaggctcgcaaaagccaataatacggccaagttgcgggtaggtttttgtatcgccgtgtgtcatgcccattcctccaccgcacgcaacattaaaaccggttagcttgccttcttccaaaatggctataaaaccaatgtcttgtgaaaagatatccacatcatttgcaggtggaacggcaacgccaattttaaattttcttggcaaataaagaggtccgtacatcggttctacttcatcttgctgaggcgtgcccgcgactttttcttcgtcaagccaaatttcatgataagcccttgtttttggcaatagcgcttcactcaattttttcgcccagtcgtagacttcaccatggacttcagattggtacggattgggcgtgctcatcacatttcgattgacgtcgccgcaagcagcaatcgtatccattaaagcagcattaatgccttggatgtttttcttcatattccattttaaaatgccatgcatttggaacgtttgccgtgtcgttagccgaagcgtgccattgccgtatcgatgggctagatcatccatagccagccattgtttcggtgtggcgacccctccaggaagacggacgcgcaccataaattgataggccggctcaagcttttgtcggcgccgctcttcacgcaaatcacggtcatcttgcaaataactgccatggaatttcattaaccggttatcgtcgtctgggatgccggcgcttaatggttcgtttaatgattctgctaaagtgccacgtaaataattgctttcttctttaatgcgttcgacatcactaggaggtccatcttgtgtcggtgcaaatttttggtctgccattattttctccctccattaatacacgtcgcgctggtaacggttattttgctgtaagtgactgagataggcttctgcttcttcttcgctgcggttgccttgttgggcgataatcgaaacgagcgttttatggacatctttcgccatttgtttttcatcgccacaaatataaagaacagcgccatcttctagccattggaacacttcatcggctttttctaacattttgtgctgcacatagactttttcgtcctggtcacgggagaaagcgacatccattttcgttaatacgccttctttcatccagcgctgccaatccgtttggtatagaaagtcagtcgaaaaatgctgatctccaaaaaatagccaagcgggcccctctgcccccgtctcttcccgttcttccaaaaaggctcgaaaaggggctactcctgttcctggaccgaccattaaaatcggtgtgctcccattctcaggcaagcgaaaattcggattacgctgaataaaaatgggtaatgtctcccctggcgctttgcgctcagcgcattgtacggagcaaacacctgcccgtttacgcccatgagcgtcatagcggacagcgccaacagttaaatggacttcgtcttcatttgcacggtagctgctagcaatcgaatacagacgtggcgggattttgcggagaatagcggtaaagtctcctgctgttccttcccatggagcgaaatccctaaccaaatcaagaatgtcccgtccttctaggtaagctcgaagctgctgttcattgccagctgccactaattcctttaaagcattgtttttggaaagcagcgacgctttttcgagcaaaggctttgttaaaaccgttatttcaaaatgacggattagcgcctcccgcaatggcaacacatcgccttgcttgccaattggcaccgattcatcaccgttccaacccatttcggcaatcaactgatcagccaattcactgtcattttccggaaaaataccaaccgagtcgccaggctcaaatgtaaatcccgacccttcaagagaaagctccaagtggcgcgtctccttgtttgaaccacggccatttaaattgatattttcaagtatttctgcttgataaggatttgtacggctgtaagcagtagccgtggtatctggtgatagcagagctgtggaactcgccgacgatttacccgttgctttttcaaggccagcaagaacacctgccatccattcagctgcatcctcgtcaaaatcaatgtcacaatcaacacgaggatacaagcgcgttcctccaagctcctctaagcgttggtccaactctttgcctgtttgacagaaaaattcataagatgagtcccctaaagcgagcactgaaaaatgcaaatccgccaatttcggcgccttgcgcccaagcagaaattcgtggaaagcaatagcgttatctggcggttcgccttcaccatgcgtactaacaataagaagtaaattcgtaacgtcttttatgttttttggcttatatgtatgcatcgatgccaatgtcacatgatacgctttgtcttccagtttgcggctaatttcttcagcaagctgttggctatttcctgtttgtgaaccgtataacacagtcacttctttgttttcctgggcagcttcgctcggtgcgctaagttcagctggtaccgttgtcgctgcttcactaagaaccgtgtttgctgttgctgccaaataaccgcttatccagcttttctgcgtagcggttagcgttggcagcaacttatttaaaagctctatttgttcttggctgaatgggctgtttgtcgtctggagctgcaccacaatccacctctcgtatcgtcttcatttttggttatcttcggctatccgtcgcagttggtcatctagccattgctcgcgcctttcatcttgcaggcgttctggtgaagcaagctcttgcaaaagcgcgcgtttttccccgtttccaccattgctcgctaatacaagctcccgtgctttctggagaaatgcaagttcttcggcagcatgctctggcaacatgttcgcgatttgcccctttattcgtttggtgtaacttgggcttgctcctgctgttgagatgctaacagtgagcaaccctttttcaattttagctggcacataaacatggcctgcttgtgcttggtcgccaacataaacgagctgacgcggggcacggttttgcaacaactgttggtgcaaaagtggctgatcggtacagaggaaaagcaaatcagcgagaaagcattcatctccacttacataacgtgcttcccaacgcagtttttcggctaacgctaacgcgtgtagctgcggatgaagtgtgggcgccacaacagttacatgtccgcctgcttcaatgatgcttaacgcccgcttataagcaagctgccccccgccgactatgacggtatttaacatgcttagctcgagcataaacggcaacgcactcatccgcatcccccttttatttcacgaagcgcctcattgacgcggcctaccagaacaggggccagcccgtcatcgctcccaaggaattcgcataacacataagcagtgtctgtgtttccttttctgtctgccaacgtatccgccaattcgttcattaaaatgccggtaaagagcaaatacggaagcacataaacacgctgcgcaccaagtttctccactttggctaacccttgggccactgtcggcgttgttgctgccataaaacacgtttcgacattgtcacatgctgttttctcatagagcaaacgggcaattttagcgacatcacttggttgattgccgtcactcgatcctctgccgaccacaagaacagtcgtaccttcttgccgtttgccttcctccgcaagcagtggcagccctgcatcagcaagccgctttaaagcaacatcaacgacatccgcttgaatgccaaacggtttgccataggcaaatacaatgtcgggatatttcctcttagccgcttgtatttcctgtgggatgtccatattcgcatggttggccgtcaataacaatacaggaatgacggcaattgccgttgccccgttttgtacacaccgatcaatcccttcggcaatcgtcggtttactcaattcaataaacgcttccgtttggaaataatcgccggaaaaatcgcttttggcttttttaataaaagcacgaaactggtcatttccctctttgactcggctaccgtggcccacatataaaatcgcctgcatagttcccctccatccatgccgacagtaccgattgcttaatttgcggcgacaaaccataggaaatcgctgctttttccgcttcatcgcttaaacaaagcacagttaactcgcttatctccttctctctgccaatcgcagcaaacgcttcacaaaaacattcaacggactcacggcttaaaaagacaagatcagtcaagtgcccttcatcgagtagacggtttatcgtcgtttgcgtggatggggcaacggttcgctcccgtgtttgaatgtgtttccagccaggcttgccacctaagccccctcggcttaaaaagagtcggtctgaccctattggtctgctcccctgaacaggggcaagcccacgttgttgaagagcctgcaccgccgaatccgtttcaccgctaaattgggcagagagggtacggatatcaagtcctcttttttggagccatcgaaaaaagacaatgacatccttctcatcatagaaggcaatgtctgtagccgtttcccaatgaataagcggggcttcctcctctacctcatggaaacgggggtatacaaacgtttcagccccttcttcttttaataaagatgcaagctgggcagcaccgtcactattggcaattagcggaaacgaaccaaacaatggtttacgctcaaaccaactttttccttggttaaggcctgcaacatcaccaatgagggcaatcgccggattcgtgaactgttccgcttctgcttttcgggcaatcgtgcctaagtcggcggtaagagtccgctgtttgctcgttgtcccccattgaattaacaacactttttcgtcctttgggcggccatgtgtgattaaattttctgcaatggtgggcaagtgtttaatgcccatataaaaagcaaccgtgtcgatggaggcaagcccattccaatcgatttcaggcaagccggtgtctctgcggctatgccctgtcgcaatggcaaagttggcgccgtgaaggcgatgggttacgggaacgcctgcataagccggcgccgcaattcctgctgtcaccccaggaacgatttcgtaaggtatggcgtattcgtcgagaaaggctgcttcttcgccaacgcgcccaaatacgcttggatcgccgccttttaaacggacgacgcattttcctttttgggcatggcgcaccatttcgtcatgaatcgcttcttggcgaagaatatggcggttcggcagcttgcctgcatacagcagctcagcccctggtttggtttcttctagcaaaagtgggttgacaagacggtcgtataataaaacgtccgcctggcgaagaatgtcaagcccctttgccgtcaataaaccacaatcgcccggccctgcaccaattaaataaaccgttcccttttgtgccattgctatcactgccttccgtttactttgcctgcctgttcaccgagtgagaatatgatgcttttctagccagccaatgatttgttctactgattcttccactgtttgtacgctcgtatcgacggtaatttcaggcgtttccggctcctcataaggggaactaatgccagtaaattgaggtatttccccattacgcgcttttttataaagtcctttgacatcacggcgctcacactcttcaagggggcatttcacgtacacttctacaaattcgccgtctgccagtagagcccttgcctggtctctatccgattgaaacggcgaaataaaggctgtcgatacaattgtaccagcatcaacaaacaatttggcaacttctccaatacggcggatgttttcctgccgatctctatcggaaaaacctaagtccttatttaagccatggcggatgttgtcgccgtctagtacgtatgttgacagccctgcatcaaacaatgaacggtctaaagcgttggcgagcgtcgattttcctgagcctgaaagtcctgtaaaccaaagcacgcagcctttatggttatggcgtgcatgcctttcctgtttgctgacacttgcttcatgccaaacaagatttgaattcgtttttgtcattgctaagtccccttatgtaaaatgtttatatgccttccccatcacgcatcgtttgttctttgtcttggcggacggaacggtataagctgattgcgcctactgtcgcgataaaaacgctgacaattacaacaagcgtataatagtcttgcgagcggaaaagcaaaatcaagctataggaaacagccaacgcaaacaaaggtgatacaatccaaactttaataatccgtcttatgacagacttctgccataagacaaatccgttttccgctgtgccgatgccgacaatggccgcagtcgtaatttgcgtcaggggcacaggaagaccaaaaatcgaagcaatgatcacaagcgctccacccgtaaaggagactgtacttccttgcagcagcgaaagattggtaatgtgtttgccattggtctcgagcacttttccgccgagcaacaaggcgccaagggcaacaaaaaatccaccagcaataacagccgttgtcacatctagcgcccctaccccgacaagagggccgacagcattggccacattgttcatcccagctgagaaagcttcaaggcaaccacaagcaattaaaatgaaggtgagaggcttatgccattttccatcgccacgcaaaaagggcaaatgggcttgatactttttgatcgtttttccagccccgaatgcgagaaaaaacgcggcaaacgggatgacaatccaaaagctcacaatcacaagcaagtactgccaatatagagcttggtacgcaaggccagccccaacaagggagccgacaacgacttcgctcgttgacaagggaatgccaattaggttggcaaaaaataaggtaaaacaagccgcagctaacacaataacaacgacttccatttgcatcacggtaggcggcagaatcccttcgccgatcgtacgcacgacttcgccacctgctagcgcgccaagccaagcgcaagcgcccacaagaagcatcgccactcgtttccttttaatcgctccacttccgtaagcagggcccatcgctgccgctgttccgcttgcgccgatattcattgcgaagaaaaaagcaatcgcaaatgctgccgcctctatcattgacgctccctctttctctatttttctatcgccctatccacgcatcaacacttcaaccacttctttgcggctgaattcttgtggaggaagcacgccttcttttaacatttgccgcactttggtccccgataaaataacatggtgctcagaatcatgagggcatgttttttgcgaagccatgttgccgcaagctttgcaataaaaactatgttcaaaaaacaacggcttaatgccaagctcgccttcttcaaattctttgaaaatctcttgtgcgtcgtaagtaccataataattgccgacacctgcatggtcgcggccaacaataaaatgagtacaaccgtaatttttacgaactaacgcatgaaaaatagcttcccggggaccggcataacgcatcgctgccgggaacaccgataaatggacacggttttttggataatagtttttaagcaacacttcatagctttccatgcgcacatcggctggaatgtcccctgcctttgtttccccgacaagtggattcaagaacagtccgtcaaccgtttcaagggctgctttttgaatgtattcatgggcgcggtgcaccggatttcgcgtttggaagccaacgaccgtcttccagcccttttcagcaaaaatccgccgcgtgtcgattggatcgatatagtaagaggcaaagcgttcataattgacacgttttgttaatacaatcggcccgcctacataaatcggaggacgtgcatacatcttcgctaccccagggtgggcttcgtcggtcgtacggtatacttcctgagcttcgactttcttatcaggtgtataaattgattcgatttcaatgacgccgtaaatgtcattcttgtaaacgagctttgcacgttcgccaacgcgcaaggcagaagcctggtcggcgctaacaggcagtgaaatcggaatgctccaaggcgctccattcgctaatctcattgacttgacaacagaatggtaatcgtcttcgtttaaaaagcctgttagcggcgtaaaaccaccaatgccaagcaactccaagtcagagagagcaaaaccatcgagtgcaatctcgtttgtgatgcccgttgtatcatacgccggatcatatcggtgaaccagttctgtttcttttactgcttccattcatgaatctcctttcgttggtgcatgcaacccgcattccgtttttcctgttcccgcccagcggccgcttcgagtatcttccccaggcatgaccgctttcgtgcagtacgtacagccaatgctcggatagtgctggtcgtgcaactcattgtagggcaattgatgcaatttgatgtacatccatatttcttcttccgtccaatgaatcaacggacaaaccttcacctttttaaagcgcttatcctgattaacaaactcggtatttgctcgtgttggagactgctcacgccttaagcctgaaagccaagcatcgtaaggctcaagctcacgggccagcacatccaattttcgaatttgacagcactggtctggatttttaagccatagttcatcgccgtaacgttccgcttgttcctctggagacaaagcaggtttagccatgttaatacgaaatgtcgggtatcgttcttttacacgttcgatcaattcgtacgtttcggcaaaatgaaaatctgtatctaaaaacaaaatgtgggcttctttttgtatttttgacaacaagtcaagcagcaccatggcctcggctccaaaactgcaagcatacacgagcttttcaccatacgtttgattcgcccagcgcaaaatatccaggctatcccgatttttcaacttggtatttaccttttcatagtcggtagcctccatttgctcaaaaacgtaagccattactctcccctttctcctctacagacaaacccatgtaagttgatatgatttataaaaattctaactgtgttcgaatagactgtcaatggcagattttcaatcctagaactgctttaaacatgaaataagcgccaacgccttctgattgtacgtgttttttaaataatggatacgaaacaggggcataaaaatagccagcaaaaaaaccgccttgtagaaaaacaaaacggtttttggctatgacccatttgtaggtacgagagaaacaaccatcggcaagagaaaaaatgctttgtttatccttttatgtttataacaggttaaaaagtttagggataattagactaatggaagggatataaaccactataaataatgctgcaacaagcgctataaagaaatagctcaaaggttttatcacttcttcaatggacactttccctacgctacaacctataaataaaacactccctaccggtggtgtcatagcaccaatagccagattaaatacaagcatgattccaaaatggacagggtctacccccatttgcacaacaatcggcaagaaaataggtgtgaaaatgagtactgctggcgtgaggtccataaaaatgccaacgactaataaaatcaacatcataatcaacaatacaatatagcgattatctgaaatacttaaaagcccgttactaatagctgccggcatgcctgttaatgccattgcccatgacatgatagaagagacagcaactaaaaataaaacaattcctgtcatcacaattgtttctttgaaaattttaggaatatgggcccacgttaaggagcgataaatcaatgaaagaattaaagaatatagaaccgcaactgcggcaccttctgtagcagtaaaaatgcctgctacaattccaccaatcacaataacaatcaatagtaaactaggaattgattgtatgatgattctgtttgcctcttttagacctattttttcagaaatcgtataatgattttttttagcaataaagtaagcaacgatcataactgttaatcccatcaaaatgccaggcaaatatccagccatgaataatgcagaaacagaagttcctccactgactaatgaatagaggattaatacaccactaggggggatcaaaatgcccactggtgaagaagttatatttacagctgccgaaaaacctttgtcatagccttctttcttctgcaaaggagccataacactgccaattgctgccgcagaagccactgctgaccctgaaatagagccaaaaagcatattcccaactacatttgtatgtgccaatgatccaggtaaccttcctgcaatcaactttgctaaattaattaatcgtaatgcgattcctccattattcataatgcttcctgacataataaaaaagacgatagctaataacgcaaaactgttcattccagaaaataaacgttgcgcactcgtataaaggatcacgtctaacggcgtagctaccataacagatacaatagaggatagaccaatgcttattgatattggaacacctatcgcaagaagaaagaagaatattccaaaaagaagcaataccgataatattgctatatccattttgaatacgccccctaaatttactcgtacgagacgaaacagaaggatttatctactgttccgaagattcattctgccctcgcctttccgctaggcttaataattgatagatgattattaatacccctgttacaggaagaatcgcataaacatagcccattggaataccaaggataggggaagtttggcttaatgtctgagaagcaagattgtagccgcctttaattaaaaccgatcctgcaaacataataatggtgacgtcaataaaaatctcaactaatttcttttttaaaccgcttaattttgatttcagaaaaacgattgctaattgttcttttgaaccgaatgcataggcggctcctagcattgctgcccatatcagaagaaaacgggataactcttccgtaataatgctaggggaacttaacacatacctgcttaatatctgccataatgcacaacaaactaatacaacagttagcatagaggcaacggtcataatcaaccggtttaagaaagtcttcacacttttgactgttaaaagcattggaatccccactccttcctttttaacgcatttcattaaaagcatctagtaatgctgcgagcctttcatctttacgatattccttgtatattggacttgcggcttcgcggaacggacctttttcaggatagtaaaattctactcccaagttctctgcttctttctttgctgcttctaaagcttcagcccaaatttctttttgatattcagtcgattcctccgcagcctcttttaatatgttttgttgcgtttctgtcagattattccacgcactactgctaataacaacaatatctggaatacgagtatgttcatcaaaagagaacgcctttgctacctcaccatgtttcccagttgttagtgctgttgggttactttcagcaccatcgattacgccagattgcagagcagtataaatttcaccatatggcattggtgtaggtgcaccgcctaatgttttcaccatttcaatttgtgttcgactatctattacacgaatttttaacccctttaaatcatctggatgcataattggtttatctgccgtgtaaaaattacgagaaccagaatcataccaagttagtcctagaaatccctcgtcttctgtagaagcaaataaatcacttactgcatcagattccattgaccgaaaaaaatgttcttcatcatcaaaaacatacggcaagctaaatattgaatatgatgaagcaaaactttcaagtgaagccgcacttactttcgtaatatctattcccccgccttgtatttgttccagcatttcacgttcatttcccaatactccgttagaaaaaatttcaactttcatttggccttctgagctttcttcaacggttttagcaaactttgttaacgctagatggacgggatgatcctcccctaaatcgtgagctaattttagtgtcttgctgccaccttctgtattcgttgctcctgaggttactaccgtttccccacatgcagctaataatactagtagactaccaatcattagactatccattatttttttcaatgatgttcctccttagctgtcagtatgagttcaatagcctcaacctcgtaaaccccttcattgcgtgatgaacgctccaaaaataatactgaacagtaatacgtacagacatgtttttatcaagtaacaagatacgtattcctattatatctttcaaaatgtgcaatcttttctaaacactgtttcgttttgttaagaaaaaagcctaaagctatgcattgacttgtatacaatactaattcatatgcacagctaacgttggcgtaaaaatagtactgcgagctttggctatttaaatcttcaacattaagattaaaggtctcttcttcaattccctcaagatgatttctgtctatcttcacactttgttttagaacgctattgccatccactaatacttgttattcccgcaacttttccttttcgattttcattatcgataacgacttttgtatttactttgcaacaacgctatttgctgcctccacttgtatcgccatattctgcgcttcaatacataattcagcggctttaaatgcatgttcctgtgtcatcgcattttctgttccgttcaaacaatctaaaataaatgccccaaaaaatggataccctatgttcccttggcactcgtaatgcttttctccttcatgatttactaaatagacatgatccccactaccactacgggcaatatcaatatatttacgcacctcaatatacccatctgtccctaaaataataacgcgcccatcgccccaagtgcccaaaccatcaggagtcaaccaatcgacccgaaaataaaaagtagcaccgttatcagcaacgagagtggcatcgccaaaatcttcaaatttaggatgctctttaaagttgtaatttgctactttactatggagtacttttgcgtccttggctccagcataatggagaaactgttcaatttgatggctcccaatatcacataaaatgcctccaacatagtccctatcgaaaaaccagtcaggtctagctgacggacttgcacggtgtggccctgttccaatcatctgtactaccctgccaatcgctccctcttctattaactgccccgcaaaaacagccccttctacatgaagtcgctcactgtaataaattccccatcgtaaaccagtctcttccgtcttctttttagccttttccaactgttcttttgttgtaaatgcaggtttatcaacaaaatagtgctttccatgatctaaaaccctaagtcctaagtcacagcgcatagatggaatactagcacccgcaacaagttttatggaagggtctcctaatatttcttcttctgaatcggctattcgggtattaggaaatttctccacaaaagcttttaccttctttggatcagaatcataaacagctgctaactctccccctgcttctaataatccgttgcacattgcataaatatgcccatgatctaaaccaattgcggcaaagaaaaattctccttcttctactacgcgattgggttttccttttggagcataattcattccatcgtttttattcatttttaacccctccatgaagtgattcccgctaatgtaaccgctttaattttttggcaacttactcgtattttccacctgttgtaatctcgtttactttgaaattttcgatactcgtttttttctcataaaaatatgtcgcattctcaataattccttctcttgaataaaatggactcgtttcatctaaagggagttttaccgtctttcccaaacttgcagattcgaaaatggcagtaatcaattcgagtgtctcccttccctcatttccatctactagtacctcttttttcccctcaatcgcgtgcaatacatcttctatttgcccagcatgtccttcatactctaaatcatttatagactcatactctttctgcagcttttcctgtaattctttatcctctacagggaacccattatcaagcgatttagatgccttcaatttccacggtacagagacacgggcatttttcccttggaaaataagctgttgctcttctccatgatgaacaactgaacttgtaatttgtgcaagacttccattttcatagcgccctatcgcgatagatatatcttctacttctgcattatcatgagcaacattactcattactgctgtgatttctgaaggcattccattcatccagcgaaaaatatcaatatggtgaactgcatggtttaatgtacagccgccgccttctttttcccaagttcctcgccaccataaatcgtaataacaatggcctctccaccaaaaagagtctacttgagtatgtacaatgggacccattaatttcgtatctaatacatgttttaatttcatcattggtgaagtaaatcgattttgggcaacaactgacaagattttcccagaccttttagcagcttcattcattgcgtcacattcttttaaagatgaggccattggtttttctacaattacattcttgccttgatttagagcttctattgtaatagccgcatgcgtataaggcggggtgcaaacagatacaagatcaatattctcttgcctgagtagttctttatagtcactataaatagctacgtttaaatcaaattcttttgcttgcgcctctgctttttcaggataaatatcgcataaagccgtaattttgcacctatcttgaaattctaaataccctttgatatgggatggacagattgctcctgtccctataatggccacgttcatcatctctacctaccctttccttattttatctacttacatcattattaaaaacgatcttacattactgaaaatagaaagcgctatcatttttatcttgactaaaccatcaagaagtcggcctctgtcacttgttcaaacaaagtgaaaccagaaaatactaattaaagtattccgggtttttggcctttaattctttcgattctacaaacacaagtttcatatgcttttccataatcgcttctgctttatcaggatttttttcagaaatacattcaaaaatttctttatgctggcctacaattacttcaaaatcatggtttttcgccagcctcagcattcttaatcgatcaaaatgactattcatttttctaatattgttccaggttctgatcttagtgcatatttcaaataataattgatgaaattcttcatctaattgaaataattgattgtgcgagcctttttttaagcaaagctcttgcatcaaaaggttcgtttctaattgaaataactgatcatcactaatttttgtacaaacctctcggacaatcgccttctcaatatgctccctaacaaatcggccttcttcaactaagcttaaatctaccttggaaacaatagtccctttttgaggaataatgattaaaagctcttcttgcgctagttgtaaaaaagcttctctgacaggtgtccgactcacattaaggttttgggcaacttccttttcagaaatttttgtacctggttttaaatcccagtttataatttgttctttaatgtgattgtagacaaaatcacgtgtcgatccttttatttcaacatcgatgctaatctgaatcacctcccgttttctatttatactagtatggtagatatacaagcattgtaagattgttctgttatttttgtcaagtggcctatcgagcatgtatgagatggatttcaagaagcgtttaatagaatcaactgaatgaccaaaaatgaaagattggaatgtcaacataaattggacaaatttctaaaggtgtaaggctttgtagtcaacgggtgatagatagttgagtgaacggtcgatgcgtatatggttgaatcagtaaaaaaagcaagttttagttcgtgttacattctcgatttaaaggtggcttctgcgacggcgttgtcatacggggtgtctatgttgctgagcgaatgggcgatcccaaaggtcgctagtatctcgtctatcttgtggttgataaacgctctaccacaatcggtatgaaacaaagcaacaatggagatcagccaaatcgaacaatttgtcttgacaaaaatctaattagacctcacactcaatgcctaaagtctaattagactatcacaattagaaaagaaggttttacgatgaaatcgatattattaatcggacaatcaaatatggctggaagaggatttgttaaagatgtaccgcctatttataatgagcatattcatatgttgcggaatggcagatggcaaatgatggctgaaccgctcaattttgatcgtcatgtatctggtattgggccggctgcttcttttgctcaggcttggacaacggatcatccaggggaatccattgggttaataccatgtgcggaaggtggcagctctattgatgagtgggcaatggacagtccattaacaagacatgcgatctctgaagccacgttcgctacggaaacaagtgaattaatagcaattttatggcaccaaggagaaagtgacagtttcggagaacgttttaagacatatgagaataagttgctctcattatttacacatttgagagaagaattgaatgtaccagataccccaattattatcggtgaattagggcactaccttggagagagcggatttggagaaaatgctgtagagtttaagcaaataaaccagattttgtataaaattgcttataatgaagaaaactgctactttgtaacatcgaaaggcttaacagcaaatccagacggcattcacattgatgcgatttcccaaaggaaatttggattacggtattatgaagctttttcaaaacaaaaacacgttttagatcctttgggcatcgaggatgaatggattgctaaggaagcaaagcgtgaactcactaaaaatgaagctatatttgttcaaagtacgaagtttgctttaggacaattaagttttaaagaattttcttctcatgtttccaaaatccatcaaagcgaggagtgatcgattgatcccacttttaattttaggtttgttaaaagaaaaaccaggttcctacgggtatgagcttctagccattatgaatgagagacattacaaatttgttgtcaattacaccaaaggatccttttattacaatattcaacagttagaggaaaaacgaatgattcaacgcattgttgaagaaagagaagctgaatcaagagaaaaaaacaaatacattcttactgatttaggagtggaggagtttaatcgtttaatgacaacgtacgggtcaaaaacagattatataaatctatctttttatagcgcaatgcttttcgaaggggcatacgacaaagaaaaaatgaaagaactcgtccttgttcaaattaaacaaacagagaaaaaaattgctctcttagaagacactttgaaaaatcggacagatcttatgaaaaatttccgccgcatgttagaaaattccctttcacaccataaagtgaacgtggactggtttcatgaaattttaaaggaaatcgatacagaaatcacggagaacaggttatcacattagacctttgaaccaattttttctatacctacgctgatgtggtgaattatcaatgttatacgacgctgctctaaaaaagaaagaagtactccccaaacagttaaatgggcttacccaggaaactaaatggggactacttcatggctacgagtgtgtttcctttttcaattcctatagaatttagccccatcacacaggagaggcgctactctagtgtctaatcaagaaaaccactttacttgatatttgataacgaaacaagatggccgttcgttgcatttacacctagcacccggtttaaaatttcttctgctgtttcgacaaattcgtaagaggatcgttttcttgggcgtggaagattaatatcatatgtgttagcgatgctcccgttttcaatcacatagaccctatccgctaatgtgactgcctcatcaatatcgtgtgtaacaaggacaacactaaagccacgctgtagccatattttttctattaattgctgcatttcacgtcttgttagtgcgtcaagtgctcctaacggttcatctaaaagcaagacatgaggagagtggacaagggtacgggccaaagcgacgcgttgtttctgtccacctgataatgcccgtggccactcattttctttgccttcgagctgaacgcttttgatcgcttccagcgcctttcgtttccggtcgtgctttaaacctaacatgacattttgcaagaccgtcttccaagggagcaggcgcccttcttgaaacatcatccggacaatgtctccgttcgggatgtatacttctccagcggtgggctgctccaagcgggctaacaagcgcaataaagtactttttccacagccgcttttgccgacaatggcaatacattcaccttttgttaatgaaaattctacgtttttcaatacactcgttgtgccaaacgatttatggacgcctgataaagagagagccatctgtgcgctcatcggatcctccttttacttctgatagctgagatgccattttaaaaagcgaaattctagcgctttggccatcatgtcggaaagtttgcctaataaggcatataaaatgatcgatagcacgacaacatccatttgcataaattctcttgcatccatcgccaaaaagccaatcccgtctttagcggcaatggtttcggcgacgatcaacgtcacccacatgataccaagcgcataacgcaggcctactaaaatagaaggaagggctccagggagaataatgtgccaaaaggccgccatattcgatagcccatagttgttgcccatctctatatagtctttgtcgacagaacgaatgccgtgaaacgtgtttaaatagatagggaacatgaccccaagggcaattaagaaaattttcccttcctctccgattccaaaccataaaatgattaatggaatcaaagccaagtgggggatattccgcaacatttgaatggaagaatcgaaaaacatagctgaaattttcgataccccattgatcaaaccaaacataaaaccaatgcctccaccaatgaacaagccgattactgctctgtttgtacttgcccataagtgcggccatatttcaccggagtgaacaagggtataggctgccgcggcaatttccgaaggcgctggcagtatacgtgttggcaaaatctcaaattgggaggccaattgccaaatgaggagcagcaaaagcgggatcacccatggaatgacttgaatgaccattcgtttactcatgtcatcaccctttctatctcgctgcgatgccgccaaaaggactggtccactgcttttccggcacggcttctttctcctcctggaagtaagggaaaaccagctccgcaaaccgataggcttcttccaaatgggggtagcctgacataataaatgtttcgattcctaagtctttgtattcttgaatgcgggcagccacactttctgggcctcctacaagagccgtcccagcgccacccctgactaatccgacgccagcccataaattcggactgatttctaatgattctctgctgcctttatggagcgcagccattcgtctttggccttgtgaatcaaagcgcgcaaatactttctgtgcctcatcaatatctttctgcgataaatgttggattagccggtcagcttcttgccatgcctctccttctgtctctctgacaatgacatggaggcggatgccaaatttgattgatcttcccgttttccttgcgtattgccttactttagcgattttttctttgacttgtgcaggtgtctccccccacgttaaataaacgtcaatgtgcttggccgttacttccattgctccgatggaggagccacctaaataaaggggtgggtatggtgtttgaacaggcgggaaattcgttttcgcctctttaatattgacatgcttccctgcaaatgtagtgggatttccagtcacaatagaccgccacgcttccaagaactcatcagttaattgatagcgctcttcatggtttaaatgaatgccatctccgcctaattcgagtggatctcctccagtcaccacgtttaatagcagccttccatgggataaacgatcaaatgtaaccgccattcgcgctgctgcagttggactgataacacctggccgtaaagcaacaagaaactttaattgttctgttgcggaaatgagggaagaggctgttacccatgcgtcttcacacgactgtcctgtaggaagcaatacgcctttgtaccctaattgatcggcagcttgtgctacttgccgggcatagtcaaacgtaacaggcctcccaccaacggttgaccctaaatatctgccgtccccgtgtgttggtataaaccaaaaaaaactcattattcgccctcctctaaggtcgcttctttaatcgaaacttcttccggaattagcccaaggttataaaatgtattggcgatgctctgctgagcttctaacacttcttcgtctatcggatccattccaaattcgtaccgtgtgagcactttctttaatgtttcttcatcgatcccgacttgcggcgacaaaaattgggcagtctcttcgatatttgttttaatgttttgctcaactttttccaattcctctaaaacaatgtcaataatctccggattttcttccgcaaaggcacggtctgccaacaaaaattctcgatttgcagccagcccttctgcatccctaataatacgggcgcctatatcatcttctgccgcctgtaaaaacgggtcccaaatgacccaagcatccacgtctcctcgctcaaatgcggttctcgcttctgcaggggggaggtatattgtttcaatgtcttcattaatggatagtcccgcttcttccagtgcttttacaagcaaataatgaacgtttgagcctctgtttaaaacaactttctttcctttcaattcgtgaacatgttcaattggcgaattctcctgcacaacaatagcctcacttttaggccgaggtggaccattccctacataaacgattggagcgcctgccgcttgagaaaaaattggtggcgcttcgccagtatggccaaaatcaatgctgcctccatttactgcttctaacagttgcggcccagccggaaattctgtccattcaacattaacgccaatagcctccaatgcaccttccagcgtattttctgctttcagaatatttaacgttccaaatttttgatagccaatatggattgtgtctgccccgttctcctttcggtcctttcctgtactcgccgtttgcgctcctcctgtgcaagcagtgagtagcaaaaatacgcttaagataatgcttaattcctgccatttaagattcatagcttgacgcccacactttgtttaacaggtgttcaatcgctttgtcaattcgctctttcccttctttactaacaatctctactcctatttctgttcgtttcaaatgggtatcaaggataaaaatcgattttaaaatcgttgtagcacccaatgtttgtaaaacaggtgtaaacgaatagtccaaagcgagataatgggccagcgttccccctgtagcaattggcaagattgtttttcctgcaaatgaacgttcaggaaataaatcaatcaaagatttaagcacgccagtgacagaagccttataaatcgggctgccaattacaatgacgtcagctacctctacttttttaataatagaagcaactgcttgtgagttaaaatgggcaaacaccaaatcggctggcggcacatccgtgaccgaataaaaaaacgtgttcgcgcctttattttggaacgcttcctcgatctgtcgcaaaagtttatccgtctttgaagaaaaagaggggcttcctgataaaaataaaacggtagtcataatgaatctcctttctgtcactttggctctttcctgcaatcacagaaaagcccgttattcctaagaataacgggctttcagtcgtctgatcagcctattttactttttgcttttttacattttcaaatcgttttttctccgtcctctcaatttgcgtgatctggccattatggatcgtaatgtgcaaggaaccaaaatcaatttcctcaataaactgaacaattgcttgtatcttttcctcttcaattgcgcccatattcaccctctccttccctcaacttatcatcacttcgacaattccaatgtgttaagttggttttaatgcaaaaatttaatcattttttgacgccatgtttcctttgtacatcaaatggattatcggttttcctcaaggacacataggatcaacccttcctataatgcatattgacagaaaaaagcgcaacctaatcttacgagtaaattgcgctttcggttttccgatcagctgtttttatttccccttatattattctgatttatcttatatgtcaagaaggttttaattatgtaccggttaatgtgctttagcatttattaggaaaaagaacaggatcaattgttaatgacacccataataaagcacaagaaataaaattggccagtaaaaaaaccgccttgtagaaaaacaaaacggctttcggccatggcctaatttgtagttaagcaaacatttgtgtttgcgacattttcgttattggaaaaggcggaaatgtctcactagaacttagaggcagcttattatctttttagactaatatgccgtggcttatggaaacacttcaacaacaaactcttcaaaaaactcatcatctacataagctttgactttccaaataccctccgacggaaacattacttgtgagggggaatgactaattaagccatcttctgtaggaattagcatttcataatctattttaataggatcaatttcttcattggttcctatgtttatagtaacggcactaaattctttgtattgaacctctttcccccaaaagtgccacatccatttttgatcttcaccagcagtaacctggccgccaatgataccgattttttccttaaccccaaacatttcaccaaactcattatcaaacgaaaggactcacctcaatttgctcattactgtcaaaatttgagcatccagccagtgcattagaaattacgaaaatagaaaggaaacaaaaccatttcacgccactaccccctctaatccataattataaagagaaagtgtacttatattttgattatccttcagggctatttcgtcacgcttccaacttctccaacctttttcgcattttccctttccactcatctgctagggcatcgactgctaaaattcgttccatcgcctgcttgtctgttggcttgcggaaatacgtgtcacagacatataacaccgacactttgtcagggtgtgggtcaagaagggctacttccccatctgctcgtacaatcccttcatggagcacacgcgctaaataaccagtatatcctgtttcgacaattcgttttaacagcgagtgaaaccctgtatgtttgtcgattgtactgcatgggttgcgtgcttgtgtaatttgaatgatcgcctctcctaattgaaaaatatctcctatgtgaacatctttttctagcatattcgtcaccgtcacgttttcaccaaaagctgctggtggaagaggctttccaaattctttctcccattttgcataatgttcgtatggatataggcagacagctcgatctgggccgccgtggtttttcttattggcaacatcatcgctgtcaaagccatgtttagacaaaaacaccgcttctgtttgctgtttctggatgccgctaatcatctgtttgccgtcaccatactcgagcgtgtttggctttccaatcgacagcctctttatttttatcgaacttgtcatccattacactccttttcaagacgaaatgtcgtattttcgtttgctccattatcgcatgatttctcgttttatacatgttttctctccttgtttgtatagagggtaaagtatattttccttctgcggttttagtcttgcccattttttcaacattatcgtcagattgctattgaaatatatgaaaaataaggttataaactagtataaaaggtctattcctttattcttacgaaggaggtgcacgaatgtcagaagacgcctttataacaaaacgcaatggaggagaagaaagctcggtttctatcaaccaagccaagagtgaagaaggcaattgccgcgagtcattacgtccaattgaaagagagggcagtaaacattcgttgtctacctaccctatcttggccgatgtactaagcttaaagctagatgaattgccgttagaaacggaaaaaccagtcgatgattgggtttccttcattctggaagagattaggcatgcgatccgtcgtgatgactttgcagcagtgaaagctcttatcgtagagcacttaaataacccggcttttcagtcacctaaactacggcagtttctactctggcatcaagctatccttgtttactatgtagaccataatcaacacaaagcgatgcatatgctcaacagcgcgttaaacgctacaggatatgcgactaaatcaatgcctagcgcccaagagctagggattctaatcagtttagcgcttcttcattccgaagaaggcaacaatggccgagcaattggccttttcaagcaagccttaaaaaaagcaacttgtccaaaaactgtccgtacaaacctcaccttctatttacgcatatacgaccatttggtgcagttgttgtttgaaagcaacgattttcatcaagcgattgaatatgcagaaaaaggattgaagctcacaagtgaggacgactatttgcctataaaaggagacttccattacatgcgcggccaatcgtttcatcgccttggccaacaagaaaaagcgcaattagagttgcacctgtccttttcactctttcaaaccgttggcctgaaaagcaaggctgaaatggtgcaaaaacagttagcacttcttcaagaagggaaggaactgccttttcactgttaacattgcctaaacgtatatgtacgcaagaagcactaccatgtattcatgcaatcatcaggctacatgcataggcgatcacaacgataaacaacaaatagctaaaagcaaatgcaaagtttttgcgaataatgctatacggattggcatttagctgcattgccaagattgttggcgtaacattaaatgggcctatcatgactgtgccaagtccaacgccaatgagcaataggctgatgccgtaaggataggctgcaacttgttcttgtaaaaacggtgatagaatcgcaattgaaataagcggatgaaagccgacaagggcaaagccaaaaatgcataatccaacgagcaaataaaacaaaaacaacgatccttcttgataagtaaaagcaaacaaggcattcatatgctcaaaccaaaccgtgtaagggaacacttcaacaaaaaagccagccgccaagaacaagaaaaacaagctgtgcagctgtgtcgtattgccttttaaatagagaaaagcaagttttttaaagcgccttggccttttaatcaccagtgcccataaaaacgtgaaaggaataatgagcacggttactgaaaataaaaatgattgcgggatacacgcatttacagcaagaagcaaaacgataaaactcataatcgcgattgcgagctgcattaatttccgccgcaataatttagggttcccgattggttcctgctgtacgataagctctcccccttttaattggcggttgtgcaacaaccaatcaattgagagaaacaggacgcttgtcacaagtagtgtcggcaacaacgctacataacttgtacctgtcaaatcaatcgtggaagcgacgagaatttccgtagggctccataacaaaacaagggcatatgcccgcaatatactgtgggcaaaaaagcgttggatgaccgcagagctgagttggctaagtttgctcttgaccgtcgccacaacaacggggacagtggccacatttaaaaacagcgttagcatatacgacatcaccgatgtgcgtcgatatagccgaaccatgtttaatgtaggaggcttgctaatcatttgcccaagtgcgcggtcgtacttgcctgctgctataatggtactcataaacggtaaaacgaacaaaagtgccaacaacccggtcattgagccaaacaagttaaaaaaaccaacgtcttttggaacataaatcaaataaaaaagaaaccctaacaaaaagaaagaaaggccagcccataagtatagctgacgagctcttcgaatattaacgactatcacaataaatgcgagaataccactcactgtttgaaccactggagtgtggtatatctggtcagttatatagagaaggacgattagaaaatataaataaaaaatggcccgcacctccctctgttatcattctactcagtatagcaccaatgattgcaccacttgaacctatctatggctaatcgaaaaaatcatcctcttatgaatggacatcaaagcgcaaattccaaagcaaagattgaatcggcattcgttattgtcaattcatgagaagtatgatatatatgtaaaaagactttgtgaaaacgttttcttctgaatattccacatcgattaattgtttgtttatggtctacttattctttaaagcatttggaaggatggacaagccttgaaaatcgctattataaaggagactactttgccatgccatttcctacttatgatgaattcatgagcatgaaaacagcagaccaacgccgcttgttggaagaagagcgtaagcagtacggaaacacgcgcatcattacagtcgaaggttggaatacagcaaacttagcaaatgtcctcaacattcttggcttgccgaaattagacagaaaaccccctactggcgaaaatcattcaagcaaaattaggcaactgccctttttgccaaaagaccacttggaagagtacaaacataattacaagagaatgaaagacttcacagaatgggaaaaaattaatattacagaccgcaaggaattaattactgcctggattgaaaagaaaatcaaacctgctgatttagcaaagcatttcggaaaaagcccaagctattggtataactacatgcaccgtgtgagacaatcaccggctttgcgcccttccgccaccgagaaacaagtttcagctaccattgaagaggcaggggaaatcattcattcagaacataagctagacagccaacacacccagttagaagcgatcccatccaaaaaaagtggcctccattatcacatcgaaggcgagtacttcgctagtgaggcgaggcggcggatccaaagcctcgacgcccttctcgcaagtttggatagcaaatttaagctgaccctttctttagaagaaatcgatacagacgaaaaggaccctgaattttccgagcaggaaattttagagatcgcgcgcttgctcaaacgaaaacggtaacgccttgaacagacagcaaaaaccaagttgggtatacgactcaacttggtttttgcttgtatgagaccactttattcgctatacgatttattggataaacgcatctaagtattggtcttgatctaagatcatatagctaccgccagcgcggtttacttccacacttacttcgcgcgcttctgccaagtggtcttcagcagccactttttcaagcacgcttaccatcgcctgaacgagctcttcttctgaagattcttcactaatgctgccgctgctcaattcattttgcaacaacaagtcaatttcgcgctgaatgttatcaagcataatgccttctacgcttactacgacttcaaacgtgtcctcgctttgggcatttgattctagcattaagtaattggagccttgtagcaacttcaagtaagctgcagacgcttcctcgatgacgtcttcattaacgttcaactcttccaaacctaacccaaaaaacattttgaataagtcgccaaattcatccttttgctttgccccttcttcctttttctcatcctctgattgatctccaggagcacgggcggcatactcttcttcattttggaaaacagttgcttgaatcacagcatcgacataatcggatgcctcttgttcatactgttcttgctgctcgtaagacaagttcccaacagctgttaaatctttgtctggcttttcaattgctgctacttcgtcgaacgcagaaaagatataactgtcatctgcttcaaattcacgttcgtagccgtcgatgtcaattgcataatcagcctttattttgtagctcataatacggtttgtatctttatcaatatcaaaagacaactcaaatgaatcagcagtgacttcatcaaattcaatgtcttctgggtcctcttcccacattcttgcattgtagtctacatatgattgcgccaaactttcaatcaacaatagctggtcgtcctcactaccgttatacgttaacaaataagaaccatccttttcttcgagttcaaatttgtcgaaaaggttttcatcatactccttgaagtgagcaagcggatttttatgttggcttgtcattctgtctaaaaggctttcgtatttcgctttttcgtcccgcgtataagtagaaatatcgctaataaacaaaaactcttcgctgtctttaaacagcgtcaatttaggcgactttgtttcgatatgagtaacgttttcagcaaaatcataggaagcaacaccctcttcttcccagccataatcatccatttgtgaaaaggacacttcaaccgattgcaggtcttgatgggccttttcagctgctgttagaaccgatgaggctgtaagttcctcctctttcgccttttcctcttctcctccggcgccttgattacatgctgctaacatactgactccaatcaatacagctaactgctttttcatatcctctctcctttttaccatgacaatagtccttattttcactaaatttcacctagtcgtctgaccctgctattccttttgtttccttttcaaacctcccgttgcaaaaaaatgccgctacactgctttttgatttgccacaacccatattgtgcctctttaatcgtaacgaatcattgtttttttcgcaactacatattttataaaggaacgtgctctgaaggggcctttctttcttttaggtgttttttcaacgtagctcctaaatcatctgttatgatatactttccaacgtcctaataggtttcaccctttatgaggcccgggaaggatttgccttcctattagcgaactttaccagacaatcaattgctcgattttgacaaggagggacaacatgttaatgagagaagagacaatcggaagtttattagaaagaatggctgaggagtccccttcgaccgaagcgctagtttatcctgaccgtcatttacgcctttcctacaaagactttaatcactcgtgtagacagttagcaaaagggtttatgcaattaggcatccaacgtggggagcatatggccgtttgggcgacaaattgtccagaatgggtgaccactcagtttgctacagggaagatgggggctgtccttgttaccgtcaatacgaattatcagcaatctgagcttgcttacttgttaaaacaatcggatacgaccacattgctcgtcatggaaggatataaagggacttcctatttagaaatgctttaccggctaattcctgaactacagacggccgaacctggaaaactagaatcagctgaatttccatatcttaagcatattgtttacttaggaaaagaacgcaagcctggcatgtggctttatgacgatattgtcaaaatgggcgaccaagtaaccgatgccgcccttgaccgcttaatgagtgagctggatgtcgatgatgccattaatatgcagtacacttctggcacaacaggctttcctaaaggcgtcatgctgacacatcgcaatttaatccataacgcaagcaatatcgctgcttgcatggaactttctcagcaagaccgcctctgtatacctgtaccatttttccactgttttggctgcgtccttgggacactggcctgcgttagcgttgcagcgacaatggtgcctgtagaagaattccatccagagaaagttttgcatacagtccaagctgaaaagtgcacagcgcttcatggcgtaccaacaatgtttattgccgagctgaacttgccgacattcgatacgtatgacctttcttcattgcgtactggcataatggcaggttcaaactgccctgttgaagtgatgaaagatgtgattgagaaaatgggcatcaccgagattaccattgcctatggccaaacggaatcttctcctgtcataacgcaaacacgcgtcgatgattcgctagaacggcggacagacacggttgggcgagctttgccaaatgttgaggtgaagattgtcgaccctgatacacaggaagaagtagctgcaggcgttcaaggggaactgctaaccaggggttatcatgtcatgaaaggctattacaaacagcctgaagaaacagccaaagtgttaactggggatggctggcttcatacaggcgaccttgcgattatggatgaagatggctattgcaaaattacgggccgcttaaaagacatgattatccgtggtggggaaaacatttatccacgtgaaatagaggaatttttatatacacatccatccattttagatgttcaagttgtaggcttgcctgatcctaaatacggggaaatcgtgtctgcttggattcgcctcaaggcagatcactctctgacagcagccgaagtccaagactattgtaaagggcaaattgcccattttaaaattccacaagtcgttgaatttgttgaccattttccaatgacggcttcagggaaagtacagaaatttaagctacgtgaacaaaaagaaaaacaagaagaaaaagcttgagcagtttgcgatgtcatacctaggtttatagacctgtcaaggtgaaagcttccgacaaatggcggaagctttcagtctgtagataaacgctcgtaaacgtcgcctggattctcatcccgttatatttcgtcttccctcgactgccaaatcgatcaacccaattaggttgattgtttatcttcgagtgagacgccgcttgtacggtaatgcattttgacgttggttagaacttcttcagctcctgcttggacggcttgttggtgaacatcgcgcaacaatgccattaaggaatcgaagtctccttcaactaccgtttcaagcgggccaacccggtgccgcaaaccagactgttcaatgacgtcaatcactttattggcaatgcctcctgtgtggtcttctttgccatttggtataagctgaatgcccgctagcatcgtggccatgtagaaaaacctcctcgattttttatgccgtactacaccatttcctgatatcgaccgatttaaacatttgcgatgattttcagattcatgtttgtagcatgtcccacttgtggccgaacattcgcctcataaccaagtgccttttctactgcctgctcgtcaccgttttttccaacccttaaagccatctcgctcctggagcttcaccttgttgtaaacagcagttgacgcctaaaatgaatgaacatgggcgatttaacaaaaacgagcaattcaattaatagcaaactgctcagaaaaacagcaagccacatcctgccccgacaacaacaacgacccatggcggccatttccaataagcgaccatagaaaacaacacagcggctaaggcaaagtcagtgggatgtttgatcgtacttgtccaaatcggtgtataaaatgctgcaattaatagaccgacaaccccagcattcgctcccattaacgccgccttcattttcgcgttttcccgtaatgcgctccaaaaaggcagtgtgccatatataagcaaaaacgcaggcaagaaaatcgctgctgtcgccaacaatcctcctgcccatccgtccatgactgcccccaagtaagcagcaaatgtaaacaacggtcctggcacagcttgggcagccccatagccagccaaaaacgcttcctcgcctatgtaaccagttggaacaaactccccttccaatagtggcaagacgacatggccgccgccaaacacgaaagaacctgcccggtaaaacgaatcaaccatggctagccattgagagggcattgccgttgccaacatgggcaaaccaacaagcaaaatgaaaaacaaggaaagggacacgactccaattgttttcgataacggaaaggcaacggaacgatcgtggttcgtgttaccctcttttgcaaatataaaatagccgagcaaacctgccagcaaaataacggccacttgcacaaatgcatagggcacaagcaaaacggcaagcaaagcaaacaaacaaatcgttttgcggcgcaagtcaggagtcaagtttttcgccatgccgagaatcgcatgtgccaccaccgctacagcaacgattttcagcccgtgaataaggcccatttcgccaacgccaaacttgccgacgaacaacgcaaatccaattaaggcaggactgaaggaagagtaaaaccaataaatgaaaccattcctcctaatgcacctgcgcggataatgccaatccctatccctacttgactgcttgccggcccaggaagaaactggcataatgcaacgagatccgcataccgttcttcatcaagccattttcgtcttcttacatattcttcgtgaaaatagcctaagtgggcaatgggaccgccaaaagaagtgaggcccagctttgtggaaataagtagtacttcaagtaacgatcgtcgtctatttttcatgccagcccccttaatagaatcatttaatcaacatgccagtatgagtatagcaaaaaagcgcccttaaagcctttacatttgacaattgaacacttttgactaccccctataaactctctccaaacaaaaaacaaaaaatctccctaaaggccgtcgttctgcttccttttagggagatggctaattagaaatcccatgctctcttttattttcctgcttttcttcgatcagagatttgctcagctcccagtccataattatccatgtcaatttcatcaatgaccactacggttgaagccggatttttgtttaatgtttcggccaataaattggttacacctttaattaaagtcagcttttcctcttttgtcagacctccattttctttagtaactttgatgtttacgtacggcatttgacgcatctcctttccgttcctttatggaatttatggtgatcaaagcagctacaagcacaactgctgaaatcataaatggaatggtaaagtcatttacggaaataattgttccagcgacaaccggtcctaataattgaccaatcgcgtaggctgccgttaacccacttactaaattgggtcctgccgcctctaatgatttcgcaagagtgagggtaagcgtcgtaattcccataaacgtagcaccgaatcctaacgccgaaagcaatgtcagcagcaagtggtctgtaaacactggtattaaaatactaatgatttgcatcatatacgcccatttaagcgcacgaaccggagacagccttgttccaagccaagaccagaaaaggcaggatggaatggcgccaacgcctacgatcgcccacacataagaggattcaaacgcgaaagatggatttttgaccaacatagccgttataaacgtaccaaagataatatagccaaacccttcacctgtgtacgaaatatataaagcatactttgcttgttttcgattttggacgagttccggatgtctattttttgatgtttgggcacttaaaggtgctgatgcatcactgttcccttgcttccacatccccagcatgatcgccaccataaagacgccactgagaagtcctaaactgatccatgtcccttcccagccataattggattggatggttgggatcgctgctcctgaaacgcatatcccaaaccctacccctccatataggaagccagaataatacattttgccggtttggtttaatcgagataaaatcaagttagagacaatgacaaataccatgccactcgtcatgcctgaaagcaaccgccatatagaccagatcatataattatccattaagcccattaataatgtcgttccaatattgacacctagcccaatgtatagccacttgtcgcttcgtggtacatatctagcccctaatgcccctaaaaaatagcctatgtaattaaatgttgctaacagccctgcagaaaaaggagtcagcaattggtccaattccatatagggaaagatcggtgtatacgaaaaccttcctacccccatgaccactgctaaacttaaaaagcctgaaagcaataaccgataatgttgatttgcaaatgtattctccatttgtcggcccctcgttatgtccgtcatatactctacacagatcatattggagtgctgtactgaacttgcaaaggaattcccttcgctttttttcagtttaccattttttaggggtattgtcccctcctgcctaacaaaaaaagctcctccctgtctccaggcagaagcttttccttcattgcaccatttttcccttttccaacacatgctcgtctccaagccaaacacttggtgaaagagtcacacagtccaagtggacaccggcttcgattgtgccgccgaatgttttacttgagccaaaggcaatgtgaatcgtaccgtatgctttttcatcttcaaggatattgccagttacgcgggcagcttcatttgtgccgatgccaaattcggctatgtaacgtccgtcgccgtcacctagcaattctaacaacttagccccttctggcccactggcgctcgtaagccgtccatctttcactgtaagcaacgttggctctgacagtttgccaatgccagcgatcgagccgtccacccaaaattggccgtatgagccttcaatttgcggggcaatatagctttctccggaaggcaagttgcctgacgccccttgtcctggaaatacgcctgtgctgctaatgccgttgcgtccgttaagatttaggaacagttcatattcgccatttgggcctgtcttaatcactgctgaatcaatttcgtcaaggcgtttcgtaaatgattctgttaaagcgaccactttcgtgtagtctgctttcattgccccttcggtgaacatgtccatcgtgatccctggcattgtcagcactttggttccttggctacttgccgcttttcgagcgcttgtatgtgttaaggaatgttggcaaatgcaaaaacaaatgtccgctgctttcatcatgtcggcgactgtggacggcggctcttcccctgaacggctccgtgtttgcattaacacaaagtcagtagcgtagtcgagatcacataaagagtcaaacacgcgccggccaatttcttctttctctaaatcagcaagaacaacaacatgctcatcccctaatgcgtttacattttgtaccatcatattactgacaatctgtttaaattccattttcagtccccctttcctttccatacagtataaagcgaatgggcgaaattcgatagcttttcaatcagacgctcatgccagctctgccgctgcccgtgcgactgcactgcgggcaagaattacaggcagccccgtcgccgcttgagcccgctgtttatgggcatttgtataccccatgcagtcgaggacgagcaacgtagcaccttgttgttttagagctgcggccgctccttcaatatcagacgacgcgtaaggcgtagccgcttctgaaacaagagggagttcgccccatttgccggcaagttgttgtatttgttcttctaaaggcacaatcgcgccaagtgtcccgtcaccgataacggcttggacaaaatggcagaggattttgtcagggaacaacagcggcttttcatgttgaatcgttgggaagtggccggtgcagacaatgatcgagcttgagacgtgcttctcgactttttgcaattccgcttgcaaatgtggaagcaacttctgcttagaaagtttagcactgtccccgtttctgaggcgtgacacatacgtctgctcatcaggatcgggagcgagcgcttttatttgctcagttgataaagaatcaagagcgcctgcttccacaaactcgacgtcagcgccaagaaaggggcgcatttctggggtcatgtccacgcgcggcgactgtccaattgtgacaagcgctatttttttcatgttacttgcccttccccatcgtttgcagaacgttcatcggtccatacaactgttgcaaacgagcgaattcattttcatcgtagaaacgcgtggttcccgccgtatattccttcgctgtctcaatcgcaaaccgcaccgcttgggcaatgtcaacctcatggctagcgcctgtgccacaaccaggtacagcagaagtggctgtaatggcgagaccaacaactggtgcatttgtcgcaacggcaggttggagaatggaattgatatggtacacatcattgccataaggtgtaatgtcctgtgtcgtaatcgcaaatgtagacggaaggtcgcctgtcgtcatttccataatccgcaaaaggtcatcgctaaacttcagaatatatccttctttgactgtaggcgagatggcgacccctttatgtttaatgattttattgcctttcgtcgtgtcaatcgaaagaatcgcttccatttctggcagcacttcatgtttgttcattgtcaaaatgtcaacaggagaacccatgaaatcgactggctcatgtggaaccgttggagcatctgggcaaatatgtgtcgtgatcaacacatcgccaggaaggcgatcgcctttttcagccatctccgctaacttgagtgcagcggcaattgctgcaacagcgccgtctgcgtcagagacaagcccaatccggcttggacgagcgccaatcccgccaaggcggccgacgattccaaaagtcggcgcatttccgccagattgttttccgtttgtgcctttgatctcgattttcacaaaatcagtcgagccttgctcaccagacaccgttgttgtttctgcttttgcataagtatagccgctaaacaacgccgctactttctcgccattaatagcaggatcgtctaacatttcaactatttgcatcgtatacgtcaatgacatcttcgctctctcccttgtgtctatgtttgtaatatgccttcacacgattttcttttgaataactggttcaatcgtgcgtagcaaccgttcattcttcattgtggagctaagaagtagctccgattgcggcacgcaaatgaccgccagtttttggccgtttttcacttcagcgcttacgacaggctgccccgtatcggcatcaaatgtcatgattaaatcaggaaaagtgcctttccgttcgccgttttcttctaatgtcataaattcattccaaaatgttagttcgattccgtcaacatccaaacggccgacatcaaatccgccttctgttttcaattcaaagccgctcacatggccaactttgactactcggccatgtaaagctgctgtgacagcctcaattttactgctgccttctttttctgctaaaaaagctttgccaatttccatcgcttttgagatgccgccgactgccccgtgagcctttacataagcgacactgactgggttgcgggcaacgcccaccattccaccagcctcaaccgacatgcggcgaatgacatttccgacatagtcaagcgtcccggagacaaatccgctaatcgcacggctgccaaacccgccagcagctgcctggtacgatacataatcttgttgctcagacaagtttagcgcccccatcgccccggtagggtgtgctcggccgttgcaaggagcgtcaataacaggcaggccagtcaatgctgcttgaagccagccattgactgtcgtcgctgcgccattttcgttggtcataatcgctttaatggtgcctggataatttttttgcaacaattcaacagtcataagcaattggttgtcgtcaacatactggtctttggcggctggtgcaccaacgagggaaacgcatacggcttcatcatcgtcgttcaattcatcaatgctaatgagctctactgtgcctttcgccagagcggcacggcctttttcaagcccttgggcaatccagccgccaccgccgccgcccaggatcgccccgccgtaaacagcttgttcaaccatctctgctgtcaatactgttcgtgccattctctctccccttccaaattaccgcgctttaaagacagagctaaagaaactgtaaagcgcatctccagcaatgaatccagctgcggttgtaaacatcgccgattcaccggcttcgcctttccatttcaaaattacgacccgtgctagtatgcccacaagaacggcccaaccagcccaagggttcatcacaagcaacccagttgctagcataatgccaagctggcgtttggcgccgccaatcaattggatgatcgctccaggaatcgcccaaattagcaagtactttcctgtttcgccagcaatgccttcttgtattgttgccgcaaatacacggtcgacaggaggaaccaagtcttgggcaaagtacatctggtggaaaaggagcaccatcacaatcgctacaacaagaccaatcatgccagcaatcagctgcaagcgccggccatagagctcttgttcccaattggtgcggcccctgattagaaatcctgtctttaaatcaaatccaaaatcggcaaaagctggtcctgtagcagctgtgtaaccggtaagcaacgctaaggcgattggcggaaacccaagcatgatcccgattaacagcacgatcagcgtaacggcaaaagccgggaaccagccagagtgcatcgcagcaacaccgacaatcatttctgaaaccaatgtcgcaaaagcagcgaagagaataaatagcactaattggccgactggcaattcagtgtaaaggccagccataaaagcaacgagcatggcgccaatgacataggcaagaaacccaaagccaaacccttttgctacgtcaagttcactgcgtgtatacacatgattggtagcctgttctgatttctttgtaatcgtccgttttttgctcgtttgtcctttgacaatggtataaatgaactgaagcaaagcaacgagaccagcgccgatcatcatcccgtggggaatgtaataatcgttgatgttaaagtggaaccatggttgtgaatagccgttgatcaacaaaccaatgccaaacatcgacaacgcccaaatgttgccaataaaagcaacgcctaacgctgacattggaatgcctaacgccgaaccggccagaccgccggcaatgccgatgccaaggaattttgccttctttccgccttcgtctcctgcacggagtgcttctgcagtcgcaacgccagacggccatgcttcattggcaccaaacagtttggaatcaaacactttgtataaaataagggcatcaatgattaaagcgaaacctgccccgacaagcatcgggaaaacaagttcaggcagccccattacgaaagggatgccaatcgggataagcaaactgtttgctgctccaaaggtggccgctgaaatggtcgtctgcaccaagttttgcgtttccaattggcgatagcgttggaacatttgcatcggaatacgagcaattaacatcgcaatcatcgcgccaataatagaagtatttggcgttacgccaagagtagtaataatttgcatcccgataatcgctccaaaaacggcaattaatacggaaagcaaaattaaagtccaatcaaatgtgcgttgtttcatgtttcctctacctcctctggcgtatcattgaatacgccatgccctgtgcttcaactaaatcaatcacaggcactgcgagttcctttataatggtttcttttaaatgaatggtcgaatagcctgtacaagcaaacaagatagcagtcgcgccttggttaataagctgccgggccgctgaaacggctgcagctggcgtttcttttttaaccaaatcagttgtattggtcacgccttccgggacaaggtggccaactagccgttcgcctaacactgtttcaatggcctcaggtattttatttgttaagccaagaacaccaatcttgtagctgatcatgcatgcggcatgcgctcctgcctcgccagcacctataactggaatggatacggctgcccggctcaagtcaagcgctggatcagctgcacaactaatggaaatcgcatcaatgtcggcatcggccgccatctctttaactagcgctgttattttcggcaaagcggcagcttttgattcctggttgtaaatgccatatggttgatctggaatgcaatcgcttttagagtgaatgcccatccgttgccgcattaggacagaatgttcttgcaataattgctcgtcttcggttgtccatacacgaacgatgccaagcatattccccaccatcctttttagacactataattttttgatccgatattaaaaatgcccaatgtgtgcaaaatgattaaaccattcattgcacacattgggcagaagcattgtcaaaatacgcgctgttgctacgatttagcgcttttctcatgtcatgttttcttacatctattttctcatttttaaaacaaaataaagcaaaaaccggacttcactatcattaagatcgaccattagtcgctcttctattttttctaaacggtattttaacgtacgtcgatgaacaaacagtttttccgccgtttttgaatggttgccattttcacgtagaaacacctctagcgtgtgaagcaacgcttcgcctgcatagcggtccgcagattctagcgattttaatgtgttctcggcaaaggcctgaacatcgtcatcatttttgagcttcgtcatgatccgctcaaaccccatctgttcgtacaaacaaattttttgtgtttccccgctctcctccaaggcagtacgagcttccagataagcctgtttagccagcgcgatcgcgtcgtaagcgaggctcacccctatctgaaacgaaacatccatttcttcctcaagctcttttaacatacgaccaatggaagatatcgtttctgcacggccttgatcacgagtaaacgtatacagaatgcaaacgtttccgtctttgcaaaacaaggcggcatttgggaaataacggtccaattttttatataattgatgtaaaaataaagcagaaatcggttctttttccacgggcgcccccgctactcttctcattgccaaaaagccgaaatagctcgttttgtcaatcaacatacggatcgaggaatgatcgggcacagcgtttttgtcaattagctccgtcatccatgctttttcttcatcggcgcgtttattcacttggtaaagccgcttccgcaataaaaaccggatttgttcttctaaaaaggtcgccgctttctttaatacagatgtccatacgtgttccttttcgtgtggcacaccgattactacagaacagcgcaaacctgcctctgcttttttgaaaacaagtcgaacttgccgtttatcaaagcgcgtttgttttgcgggttgcgaaaaaaagataaacgattgccgctctgctgtcactctgttattcgcgtaagcaatgagctgcttctcttcgctttcaagcaacacattctcccctgtaagctctcctagcccttccaaaaaatgatgtaatccccgggcttcaccaagcttatagaccgcctctagaagttgcgcttccacagactgggcttctttaaactttgtctcgaataagatggtcagtaagcccacgaaagaaacttctactggaatggcaataatgggcatattatgttcatcagcaaggcgcaacattgtctctggcaatgtatgaacataacggccaattttgacaacaaggccggcgccatttacttcaattaacttccgaaacatgctaatttgcgcttctggattgtctttgactgaataaaaggtcgaaataattaagattccttctgttagccattcattaatatccgggacttccatcacttcggctgctttaattttccgatacaaaccaccttcaccagcaagtacacgagcgagctttaaatcacctaactgtaaagcttcgcctacaatcatttccaacaccatcctctatataaatagtattttactatggaccgacatatatcgacaaaatcttttgccggttgttagcaagattagccaattaatgagcaattatctacatgccataacaaaaaccgcctgtcttggtttttgcaccgagacaggcggtttttttcgtcatttacatgtactaactcttttcaaacagttcctcgacattgacccaacattgctgttgaatcgattgttctatggcagtaaggacagcttggttgcgcaaaccgtcagcaaaatcaggttttggctgttcgccacgggcaatgccttggaggaattcatacaacaaatgaataaaggtgtgttcataaccaatcatatggccagcggcccaataggatccaacataaggatggctggcttcggttacgtcgatcgtccgaaacccttgcaaaccttcttcgtcgtgagcaaagtacacttccaactgattcatgttttccatattccaacgcacagatccatgttcaccgttgatttcaaattcatttcgattgcggttcccgccagcaaaacgtgtcgcttcaaacgtgccaagggcgccattttcaaatttagcaataatcgcagtggcgtcatcaacggtaacaggtgccattttcccttcgcttactttcgcgcttagccctcccgtcatagagccgattggccgctctttaataaatgtctttgcggtggcaacgacttcagtgatttcaccaactaaaaaacgtgcaatgtcgaggctatgggctgcaatatcgccaagtgcgccagaaccagacaccttttgatcgagacgccatgttagcggaaaggaagggctcataataaagtcttgtaaataacgagcacgaaaatgatagatttctccaagctttcccgacgcaacgagctgtttagctagctggacagcaggcacatagcggtaattgtggcacaccatatggatcacatgattttccgtaactgcggcatgcatacgctgcgcttcgtctaaattcatcgctagaggcttttcggtgatgacatgtttgcctgcttttgccgcggcgattgcgatttctgcatgtgtgttgttcggcgtcacgatgtcaatgacatcaatgtcatcacgttccacaactttgcgccaatccgtttcgtaagattcgaatcccattttttctgccgcttgttgcacagcttcctcattgcgaccgcaaacgacctttaaaaccggctttgcctccacatcgaaaaagaaaggaatatcacggtatgcatggctatgtgctttccccataaactgatagccaattaaaccaatgcgaagttcttttttctccattctgtcccctccaaacgatcattttgttaaccaattccacttatatgcggcgattcccttttttcattatgaaaacgtgctatctagcggcccaaaccatgcctttcctcatcaattccattacttcaggcatgcggacaattttagctacgtggcccagggagcaatagtagacattgccctttccccatttctttgtccatacaactggcatttccacgctgccgtttacagcatgggggccatcagcaatcggaaaggtggtagtcgcatgtacggaaacggcgggatcaacatgcatataatactgctccgattctacttcgaaatcggccattccgtttgttaatggatggttacggtcctttatctggactgtataacgaacgccgtcattgccaggatgagcgacccactgccctcctaccataaactgatagtccgttgccatgcggaacgagtcccccattccgccatgcaaaccggcaaggcctgttcctgtttcaattgctgccattaatgctttaagctgatcgtcttcaatttgcccttgtgtccagtttgggacaattaagtcgtattcaggcaaatgttcttctgttagcaccgccaatgaatcggcaacattaacagaaaacccttcttcaataagaatgccttcaagaatagaggcgacttgctctggttcatgtccatcccaaccaccttgaaagatcaatgcttttttcacgtgtacacccctttattaaaattgtttgtcacttgaataggcagcgctaaaaaatcaactgcttgttgtagacgcttccattgcttataatgtttattatctaaacaaagtcaaggagtccaatggatgattaccatcgaccacgaaacaatgaaagacatgaacaaatcaacggttttccgcctcattcaaaggcacgctcccatttcccgggcggatatagccaagagaagcggattaaataaagccactgtctctgctctagtcgcacagttaattgaaaaccaatttgtctatgaaatcggtactggcgactcaagtggaggcagaaaaccagtgttgttgtattgcaatgatcgggccagccatgccatcagtgtggacattggcgtcaatggcttgctcggcattattacggacctctctggcaaaacgatagccaaacgggaaatggcgctaactagtaaagaattcaacattgttctggccaacacagaagcaatcattgagcaattgattcacgaagcccctccatcgccgtatgggatttgcgggattaccgcttccgtccctggcatcgtcgattcgaaaggcaacatattgcttgcccccaatctaggctgggagaatgttgatatcaaaacagcacttgagcatacattcaaacttcccgttgttgttattaacgaagcaaatgctggagcgctcggcgaaaaacaatatggcgtcggcaaaccttattcggcgatctcttatatttccgtcagcattgggattggcactggccaaattattgacggcaagctattcacaggtgcaaatggctttgcaggcgaatttggccatatgtccattgaccgccatggaaaacagtgccggtgcgggaatcaaggctgctgggagctgtatagttctgaaaaggcgttacttgaaatcgccgcaatcaacatgaaccgacgaagcatttcatttgaagaagtgctcgcagctgccgaaaccggaaaccaagctgctctagatgcctttgccacagtcggtcattcacttggcatcggccttgtctcgatgattcattccatgaatcctgaggcgatcatcataggcaaccgttttgctaaattaaaaccgtatattcaaatcccaattgaagagacgctcgcaaaacatcttccttcctattatcaaaaagcagtcaaactgttgttttcagagcttggccaggaggcgcctttactaggcggatctcttcttgcaacaagccagtttttcaaccgccaccgcatccacttaacggttcattagtacaggcgaccccttcattgtgtcgagaagcggtacaccgtttcatgtttgtaaatcgtacccggttcaagccaaatgtgcggcaaatcgtcatattggagggaggcaggggaagcttgtgcttctaagcaaaaaccgccatattttcttgaagggccgtctgtaagttctggttctgaaccaagcccattacctgtatagaggacaagaccaggctgtgtggtttccatcgatagcacacggccgctttttggttcataaacacggacgctttcatgtttagtgtgatcaagtaaaaaataatgatcatagccattgccgacacaccggttttgctctatcccgtcttctagtccttgccggaaagcacggccttggctgaaatcaaataaactgccttttgcctttacgacgtttccagttgcaatcaactcattgtcgagctcaaggtaggcagatgcatccatttccagcacatggtcatggattgttgcccctttttctccggccaaattaaaataggtatggttggttaacgtaagcggcgtccgcttgtcagtcttcgctgtgtatgaaagaatccattcattgtcatcggtcaatgtgtacgtgatgtcgatgtcaacattgccaggatagccgccatccccgtcaggagaacggtgatgaaaccgcacgcctgagccccttgcagatgtaaacgtttctgtttcaaagcggatttggtgaagcccgttagctccgccatgcaaatggtttgccccttcatttgcttgcacatgtatttgtttcccctctgctgtaaatgaagcgcctgcaatcctaccagcaactctgcctattaacgccccaaaatagggactgttgtccgtatactcattcatgtccttgtagccgagggcaacgtttgctaattgcccgctgcggtcaaaagcatctattctcgttacgatgccgccgtaatctaggcagtcaaggcacatcccatgtttgttttgcaaacgaatttggttccagccatttctgaccatgtttattttcggttccatcaactgtctcctcttatttgcggaatgacgagagcgctttgcaaatggctgctgtcgccggatagacttgtttatacaattcatataacgtctcatatgtttttgccctgttacagtctggctcaaacactgcatcctgtttaataaatgcctctgcacattccttcagcgaaccaaaccagccagctccgtatgcagccagcatcgccgcgcccatgcccggcccttgctcacttgtctgcttcacaattggcgtttgaaaaatgtcagcttgcatttgtagccacgtctcgctttttactcctccgccaatggaaacaattctctcaatcgtctttccttgttctctgaacaaatcgagtgactctcttaatgaaaaagtaatgccttcaaggatcgccctagtaaagtcggccttcgtatggctgctatcagcaccgataaaactagcacggatagtagcatcagcatgaggcgtccgctctccagcaagatagggggtaaacaacaatccatttgcccctggggggacttctgccactcctgcaagcaattgcggaaacgtttcttcaggagcaaatgtttgcttaaaccaacttaaactatatcctgccgctaatgtgacgcccattgtataaaatgcatcttcagctgcatggttaaaataatggacgcctcctccaaatgtcttccctttttcttcctgatacgaaagcataacgcctgacgtgccaatgctagcgagcgtcttgccgtcttctaaaattccagctcctactgctccgcacgcattatcggctcctccagcaaaaacgggtgtttggcgaggcagccctgttgccaatgcggtgtcttccgttaattggccgacacaagcatgtgattccactagcggcggacaaatcaatggatcaatgccaaatgcggaacatagcggttcgctccacgttcttccttcgatatcaagcaagagtgtacctgctgcgtcagaatagtcggtatgcaatgcaccagtcaacttcaagcgcacgtagtcttttggaagcacgaatttggccgctttggtaaacacttccggttcatgctcccgtacccacatcagctttggcaatgtaaatccttcaagtgctggatttttggctaattgttgcaacctttcagcgcctagcttttcgtaaatcgctttgcattgaggcgaggtgcgtgtatcattccataaaatcgccggacgcaacacttcattttgttcatcgagcaagacgagtccatgcatttgccctgaaaaactgattccctcaatttgggtcgttgcttgtggcaaggctgctgcaacctctgataatccagcaatcgtttccctgacccaatcatttggatcttgctcgctccatcctgatttaggatgagacaacgggtacggtttagacacttccatgaccacttcacccgtctcgttgacgacaagcaatttcactgcgcttgtgcctaaatcaacaccaatgacatgtttcaatttgatcgctccctgccggtcgtctactttttatgcgaatgcatttaataaatactggttaatgattgcttttatccgctccactcgccctgaacgggttttgatttcgccaagtgacagcgcatgcgcttcaagttggtgaaaatccgtatttcctaaaacaatctcacggccgattccttccttataactttgataacggctgtcgacaaactgttcaaggacgcggtcatctataagctgctgcgcaaccttcaagccgattgcaaaactgtccatgccagcgatgtgggcgaaaaacaagtcatcagcttcaaatgaaccacgccgtactttcgcatcaaagttcaagccgcctctgccaagtccgccgttttgcaaaatttcatacatcgccagcgttgtcgaataaaggtctgtcggaaactcatctgtatcccaaccaagcaaagggtctccttggtttgcgtccactgaaccaagcatatgatgaatacgggcataacgcagctcatgctcaaatgtatgtcctgcaagcgttgcatggtttgcttcaatattaaatttaaatgaatcttggagcccataatgctggagaaaggcatatcctgtagccacgtcaaaatcatattggtgtgttgtcggttcttttggcttaggctcaattaaaaactggccatcaaagccaatttcttttgcataatcaactgccatatggaaaaagcgtccgagattgtccatttcaagctttaagtccgtatttaataatgactcatagccttcgcggccgccccagaatacataattttcagcgccaagctctttgccgatttccaagcctttctttacttttgcagcggagtaggcgaagacatcagcttcattagaagacgcggcaccgcctacaaaccgaggatgtgtaaaattattcgctgtgttccaaagcaattttgtgttgctgtctttcatatagtccttgatcatcgcgacgatgacatctaaattggcatacgtttctttcaaagaacttccttctggggcaatatcgacatcgtggaagcaaaagtatgggacattgattttctcgaagaactcaaatgctgcttcaacacgggcctttgctaagtccatccctgtgtacgcattccaaggccttatcgccgtcccagccccgaacgggtctgacaacgcttctgtaaatgtgtgccagtaggcaatgctaaaacgtaaatgttcggccattgttttaccgctaacgatctcatccggattataaaatttaaatgcatacgggttgtcagacttagcgccttcataagaaatgtggtttacagcaggaaaatagctcattcgatgaccttctttcattaggtttgtttattatttaaactaagtttagcctctttttgtaagcggtgtcaatcagattatgaaaaaacgtttaggcgatattagaaagggcagcaaaccagacacgtttactatggaaagtaggtaaaaagaaacgtgctcatggagagaaatagaaaatgggaatgcagaggatgtctgcattcccacgtaaaatatgtttttgatttagaagttcgttcggcctcaccagactgggatatgatccttttatttcagcacaatttggtaccgttcgattttttcgctaatgtctgtaatcgcttcccgtaatagcggcaagcaggagtcaaaacgctcctcattaaagcgataggctgggccggatatcgtaatcgaaccgacgatccgcccttcatggaaaagcggcatcgccaaagcgataacatcttccgtatattcgccatggcttatagcaaacccgcgtttgcgaatggttgccagctcattgcgcaattcaatttcactcgtcatcgtcctgtccgtataggctttcaatcctcccgcaatcacttcctcgattgcctcgtcaggcatatatgccaaaatgctgcggtaagacgcacctacatataagggagcccggctgccagcagacacggaaaacttgactttattggctggttcaacaacttcaagcgtaagcgcttctttgccgtccaaaattgttagaaacgtggactcgcctgttttctctgttaaacgggcaaggcttgggcggatcaattcttttacatttaactggtcatacataatcgaacctagctcccacacggcaaacccgaggctatatttctttgtctctgcatctttcgttagaaagttttgggcttccagtgtttcaagtatccgataaattttcgtatgattgatccctgtagcgttggacagctccctgcctccccaaacaggcttttctttcgtaaacattttcaaaatctccaatgcttgatgtacagtttttaacacagctcctcctaggccattgcggcaagcttaattattactagtttacatcaaaacactgcccatgggtgactgacgtttcacttactgttgcaaaaaatcaatcacagcagctacatacacttttgcacaaaggacaacgtcctccacttttactttttcgtcaaaattatggatgcttggcaaatacgcaggtccgtattggagaactggaatatggtgatcacggaaatggcgagcgtcgctgcttgcccactgcatcacgccgtacgcttcttctttcgttacataggaaatattattgataatggctgtgcaaactggatcggttgcaggcgtatggttggcattgctgcgaaatccaaaaggcgtaatcgcataatcaatccctagctcatcaaggcgcgcttcaatgtacgcatacacttccttttgcgtaatcccaaacggcaggcggcagtcaacttcgactgtacaggtgtcagggatgacattcgattttgtccccccatggatcgtgccaatgttgacgcttattttttcaagaatttctttgtatttttcacgttcaacttcgacttcttccatatattttcgggaaacagcaaggagcggtttcacttcttcaggaatatcgacgtcgatgtcaaaaacggtacggattgccgcaattgccttgattgcatcggtgatcgcatttcggcctgcaagcggggacaagcttccatggcccgcttcgccgtaaacgtccaatttaaaccagcaagaccccttctggccaattgtcggatgcaaacgagaagaaggctccgcaattaagcaaccgtctcccttaattaagcccctttctaggagccaaggaactccgtactctccgcctgtttcctcgtcagggacgattgcaagcgtaagtttcccaggcagtttcactcccacccgtttaagcaaagcagtcgcaaatagcaagccgccaaggcccgctttcatatcgctagcgccacgtcctaggatccagccgtcttcgacaatgcctgaaaaagggtcgaacgaccacttatcccggtccccagcaggaacaacgtccgtatggccgcaatatattagctcttttccgccttcctcgccaatgcttgcaatcaaattatacatctgttcattcgattggtgccaagtaacatcgattccatctttgcctaaataatcagcaatgaagcgacttatttcagttgtatcgccaggggggttttcggtattgatctgaataagagaacagactaagtcgataagctcttgtttgttttcttctacagcaacaattagttcgtcttttatattcattttacagccgcctctttcccgagcgtttgcaaatgcgtcatttttccgtacagtttttctaacaaggcaaattcttcttcattataaaactggcaatttccttcgccgtatgctttcgccgtttcaatcgaaaaacgggctgcttgttcgacatcttccaaatgggtcgctccagtggcacagccagcaaccgccgcttgcgctgtgatcgcaacgccgacaactggactttgagtagcgacagccggctgcagaatgctgttgatatggtaaaccccgtttccataaggcgtaatatcttgtgtggtaattggcaacgtaacaggcaatattccagttgactggctatagagaaacagcaaatcttcgcttacccgtaacacatacccttcttttacagtcggcgttacggcaatgcctttatggtttgtaatttggtttcctttcgtcgtatcaatggacaaaatcgcttccatggctgggtcgacttcatagtgattcatagttaagatatccactggcgaacccataaacggaactggatcatggggctgtgttggcgcattgccgcaaatgtgcgtggtcaggataacgtccccatccaaaaagtcgcctctctcttgcatgtctagaagcttcgccgctgctgacatcgctgcaagagcaccgtccccatcggagacaaagcctgtccgttctggacgggctccaattccgccaagccttccaatgatacccatggttggcgctgaacctcctgctgagcgaccgtgccttccacgaacatggactttaacaaagtctgttgagcccttttccccatcgacgcgtgaaatgtcgacatctgcatgaggcgaaacctcctttaaataagcagcgaccttctctcctgatacacgggggtcgtccataatgttatacaaacgcaaaacatgatttaatggcatattgcttcctcctcggtgtcgttcatcaaatggcaagcgacttgctggccattcgtttgtttaatgagcgtaggggccacttcctggcaagacggcatcgcctctgggcaacgtttgtggaaggggcatcctggcggcggattgaccgggctcggcacatcgcctgataaaatcgttctctgtttttgttcaaatgggctttctttcggaacagctgacaacagcgctttcgtataagggtgtttcgggtgatggtaaatttgttcatatgtgcccatttccacgattttccctaaatacatgacggcaatccggtcacacatataacggacaacatttaaatcatgggaaataaatacgtatgtcaattggaactcactttgcaaatcctttaacaaattgatgacttgcgcttggacagagacatccagagcggagaccggttcatcgcaaataataatgtcaggatgaagtgctaacgcccgggcaatattgatgcgttgtcgttgcccgcctgaaaattcgtgtgggtaacgtttggcgtgtccttcattcagcccgactgtttcaagcaactcataaagccgctttttttggctatccctcgtgccaacgccatggatgacaagtggctccataatgagttggccaacggttttacgtggatccagcgaggcatacgggttttggaacaccatttggatatgtttacgcacttttcgaacttcagctgcagaaaggccagctaaatttttaccatgaaagtgaacggtcccctccgtcggccgaatcagttgattgatcaacctagctagcgttgatttgccgcagccagattcgccaaccacaccgagcgtttcccctttaaataggtcaaaactaacgccgtcgaccgctttgaccgtttgcgtttcccgcttcaacaacgattttttgatcgggaaatgcttctttacctgttcgactttcaaaatcggttcagtcatgccaacactctctccttccgttcgagcgttttgtcttttgtctgaaaatgacaagccacttggtgcccttcctcggtttcgataagctccggctttttctcttggcacaccgcttttgcataagggcaacggttggcaaatgaacaacctttcatttcagcacgtaaatcaggaggcgaaccaggaatcgggtgaagccgttcttgttggctgactgttgataaaatttgcgaatcaaacaacccccatgtatacgggtgttgtggattgtcataaagcgttttagcagacgctgtttccaccgcgctgccagcatacatgacaatcactttgtcgcagctttcccatacaacgcctaagtcgtgtgtgatcataataatggcggtattaaattgctgctgcagctctttcatcaacgttaaaatttgcgcttgcacggttacatcgagagccgttgtcggctcatcagcaataagcaattttgggttgcatgctagcgcaatggcaatcatcacacgctggcgcattccccctgaaaactcatgtggatacatcgagagcctttttttcggctctggaatgccaacaaggcgcaacatttcctctgcccgttcttttgcttcttttttgctaagcccattgtgaaggcgaatcacttccatgatttgatcgccaactgtaaatacaggatttaaagacgtcatcggatcttggaaaatcattgaaatttcattgccgcggatgctgcgcatccgtttttcaggcaactttagcaaatcttcgccgttgtaacgaattacaccttttggataattcgcgggtggcgatggcaatagccgtaaaagcgaagtggccgtgacgcttttcccagaacccgactcgccgacaatgccgactgtttccccgcgatgaagtgtaaaactaacaccatttaccgctttgactgtatgggcggaagagcgaaaatgaacatgcaaattgtctacttccaataaacgttctcgtttttccatgagctccctcctatactttcattttcgggtctaaggcatcacgaagcccatcgccgaacaagttaaacccgagtacagtcactaaaattgctaatccagaaaacaatgccatatgaggcgacaacaccagatagcttgtcccatctttcaaaatgctgccccaagatggcgtaggcggctgcacgcctaaaccgagaaaactaagcgcagcttcagaaatgacagcgccagcaatgctcattgttccatatacaattaaaggggcaaggcagtttggcaaaatatgcgaaaacataattcggccatttttagcgccaagagagcgtgtcacttcaataaattcttcttcttttacagataggacttggccacggattatccgcgcaaatccgggaacacttgcaatgccaattgcaatgatgacattgacaagcccttgaccgaggacagccataagtgaaatcgctagcaaaataaatggaaatgcaaatagaccgtccattgtcctcataatgattgaatctagttttcctccataaaatccagcaattaagccaaggaatgtaccgacaagcgctccaaggacaatggaacctaagccaacaatgagagaaatccttgagccatagacgatgcgcgaaaacaagtcacggccataattgtcggtcccaagcaaatggccgcctgaccctgcaggtttaagcgaattggcggcatccatcgcatttggagaatgagttgcgatcaaaggagcaaacaaggcgagaatgaccatcatgacaataatcgccatcccaatggcagccagtttgtttttaagaagtttgcgaaaaaatcggaatttgtttctttcttcaaacgaaaccggttgttgttgttcgatgacaggcggctgttccattaggatgttcctccttttgagccatttaagtcgaccctcgggttaacgactttgtacaataaatcaacgactaaattcactaatacgaaaatgagggcaataaacaaaacagacccttggacaacaataaagtcacgtttgtcgattgcatcaacaatcattcgccccattcctggccacgcataaatcgtctctgtcaacaccgcgcctcctagtaacatcgacacttgcatacccgttacagtcaacaaaggcgtcaacgcatttttaaacgcatgtttgctgatgacccaaaattcttttaatccttttgcccgtgccgttttaatatagtcctgcgcccctacttcaagcatgctggaacgagtaatacgggcaaactcagccattggtatcgtcgcgagtgtcacactagggagaagcaagtatttaaagaaatcccacaggccgttgtcaagtgagcccatccctgttgctggcaaccagccaagctggacgctgaaaaaaagcacaaacatcacgccaagccaaaaaacaggcatcgatacaccgacaagggaaccgaatgtgacaaggtaatcaatgacagaatttcgttttgctgcggctatcattccagccggcacaccgactaacaaagcaatggccagcgcggagacggcgagcagcaatgtgttgggaaaacggtccatgattaaagacaagactggttcgttataataggcagatgtgccaaaatcaagctggagcaagtctttgaaatagtggagaagctgctgaaaaaacggctggtctagccccagttcgcctcttaatgcttccacgtcttctacacttgcttgtggaccaagcatgacacttgccggatcaccgggcaagagtcgggtaatgataaaaataaccaatgaaacgacgaataaagttgggattaaatccaacaaccgtttgccgacaaaatgaatcatgacgatccccctagtaaaaattgaatcattgattcgttatctgaaatttaaagctgattatagcataacaacgacctttgtaaatggttaattttctgtatttcagaaagtttaattttcgccgtcagaaaatctgacagtgaaaaaccctttgtttaattggttttttaaatgaaaacccttaaaaatagacggataaaataaaaatctgaaaaaataaccatttacttttcagacttcttgcgctaaagtgagcgtaggaattttcagaatcaatgtttcactattagaaacacacaagggggatatcagcaaaatgaaaaaaacagcacttccattccttttggcagcttcgctgtttgcattaggtgcttgtggcggagggggaagcgatacggcttcagaaggcgatgctagcaatggcggcgccagtgcaaatgccgatggcacattgacaataggtctatcagccaatccgaaaacgtttgatccagttgattactctggccaatacgaaagtcatattattcgcaacgttgctgacacgctcgtcgtctataacgaagatctaaccgaaatcataccttccttggcaaccgaatgggaagccgctgacgacttaatgagctacacctttaagttgcgcgacgacgtttacttccaaccaggcgactaccaagacggccggaaaatgacagcggaagatgtaaaatatagtttggaacgttcagcgaacgaatcggctttaaaccgcctccgtatggtagaagaagtcgaagttattaacgacacagaagtcaagcttattttaaacgcaccaaactctgccttattggctgttttaaccgatgccggcaatgtgattgttccaaaagaagaagtggaaggccacggggatagttttggctcacacttggtcggaacaggcccttttacactggaacaatggcaacaagaccaaatggtgaagctagaacgtcatgaaaattactggggggagacacctaacttagcccagttaaactttcaaatcattcctgatccaactatgatgacaaattccttgcgttcaggcgatattgatattgccactgatgtgaaaggacaagaccgggaattgattgaacaagatggcaacttagaacttttatctgtacctgggttggcaacaacatacttggatttaaacaacgtcgaaggaccgacagcagacccgaaagtacgtgaggccatttacaaaggcacgaacgtgcaagaaatggtagacggtgtgtaccaatggggtggggcagaagtttcttatttgccaattccgcgtcaatcatggggctatgatgaagcacaagaaagcttagcgccttcctatgacccagaagcagcaaaagagcttttggccgaagcaggttatcctgatggcttcgataccgaaatttacgtagcagagagccgcgtcccatacgcgacaattttccaaaaccaaatggcagagatcggtgttaacgtaacgatcaacacagtggaatggggcacttattccgacatcgtctctaaaggccaagcaccaatgtcgattggcggatggacatggtatcctgaccctgatttctatttgtaccagctgttccatagcgaccaaattggcgcgctcggaaacggaaaaggctacaaaaatgaggaagtcgatgcgttgctcacaaaagcgacgtcggaaacagatgaccaagaagaacgtgcagcgatttatcaagaagcacttgaactcattatggccgatgtcccccggatcgaacttgataatacggaaacagcggctggcgtttcctcacgcgttcacggctttaacgttagcccagacggttctatccgcatcgttacgccttacggtaccaatgtctccgttgactaatgcatctagaagagaagcgaacaaacgcgcttctcttcttttgtacatgccccaaagtagccatcatgttagaaaggatgttctctaatgtatacagctattcgttctacccacgtctacgattccgatttagctgcgtatcaagcgaaaacgattctgctccaaggcccgtccattgaggcattgcttccctatcacgcatcgctccctgacaactgcgtggttatcgatgtaggcgaccactatgttctaccgggttttatagatggatttagccaaattggcgcaaaagaaatcggtattcgctgggaaggcgaggatgagacagaaaccgcacaaagcgacgacttggctccttatcgaatcatcgacagcatttatcctttcgacgctgcctttaaagaagcgcttgccaatggcgtgacggtatcccacgtcgcttccggaccagggagcgtgatcggcgcacaaaccgcgatcgtgaagcatgacggagtaactgtggatgagatggcgattacgccttcgtttggccattctttttcacttggagacattcctaaacgtacatttaaacaacagaccaatcaaccattaacgagaatgggcattgccgcttccttgcgacgttactttgacaaacacggcacgccagcaaacgtatttatccgcgcttaccacgggactgacattgacacagcgttgcgcctccaagaggagtatgcatttacattgacgcttgtccatggtacaggcgccaatgaacgtcaactgaatgagttaaaacaacggggggcgtctctatttgcagggccgatgttccaagcgcgggagcgtcacgaacaacaaacattgtgcccttcctttcataaagaagttgttttattaggcatcccccatgcgatcatttcagaccaccctaccacttctgtgcggaacttaaaattagaggcctcgctggccgtacgtgaaggtttggacgaaaaacacgcattaaacgcccttacccttgccactgccgaatgcttagggatctctgacagaactggctcgattacagcaggaaagcaagctgacattgccatttggaatggcgatcctttatcgttaacaagctccgtcacccacacgtttgtaagtggcaaactctgttatgaaaaggagaaggatcagcgatgaatacagtatttcgtggcgcagatttgtatacagtcgataccgatttcacggttatccaatcaggagatctttacgtcgctaatggcaaaatttcagcgcttggccgccatctgaatgtgccagctggcacaaaagaagtcgaggcaaaagggatggttataacgccaggtctcattgatatccacacccacgtcgggatctgggctgaagtgacagaggacgtaaacgatgccaatgaatattctgaaccgtttacccccctcatggaggcaacggacggcatccatttagaccatttttccttccaagatgccgtgcgtggcggcgttaccactgtacaaacgggggctggaagcgccaacccgattggcggcatttggtccattttgaaaacagctggcgctacattagaggagcgactcttaataaaacgaagcgggctgaaaggcgctctaggcgaaaaccctaaaaatgtattcgggcaaacataccgcaaaaagccattcacacgtatggcagttgcttcgattatccgcaatggcttcttgaaagctttgccttatcggcacttgtcaaaagaggaactcagtgttgatctccaagagctgtggccgtttattgaagttttaaatggcagcatgccgctccgcctccactgccatcgtgccgacgacattgcaactgctcttcgcattgccaatgaatttggcgtcaagctccatctcgagcatgcgacagaaggctatatgatgatcgatgcgatcaaacaagcaggggtggcggtcacactcggtccatttatgatgtctgcttctaaatatgaattgcggaacagcactcctaaaagccctgccctaatggacgaagcaggcatcccatttgcaattatgacagaccatccttttacgcctattcaatatttatccgtctgcgcagcggaagcagtcaaatacggactttcctctgaaaccgcactcgcaagcattactcgcactgctgcagaattagccggcatctcaaaccgcgtcggctcactcgaagtaggaaaagacgctgatctagctgtttggacaggtcatccatttgcaacaaaaacaaaactttgcgccacttatattaatggtagttgcgcttaccattctaatccacaatagacgctaaaaagccgccaaatgatccttggcggctcagactgtagacaggcgcacgcacctttcgttgcccaccgttcatagacttatgaacctccgtctacttgcctcgcccatgttaagcgaccttgttctatttactactctgacgttacgcctccaacttttgtattcgcctgcggattgctcggatcgccacgtcatgttcgctcaaaatttcataggttgatttttggttctccaataactgtttcacatttttgttcgtttccatcactgcttgtttgatcatgccttgttcttctttcaacttattcacgtcgttttctactcgttgaaaacgcttttctaacccatcaatacgttcttctaaaccgtcaaaacgcttttctaacccatcaatacgcccttctaaaccgtcaaaacgcttttctaacccatcaatacgcccttctaaaccgtcaaaacgcttttctaacccatcaatacgcccttctaaaccgtcaaaacgcttttccaatccacccaaacgggcagctaattccttgacattcttttccgtggccaccgttttttccaaaatcaattttaacagttctctttcctccaagtagatcgcctcctttacaatttgatgcccgtccatgttgttcactcttattttattctaccaaaaacaaaagaaaaggggaacattagttctgtttttttcacattacccaatttaatcagactcgagtttatggcaaaaaaagagccgaatcggaattcgatagcggctcttcttctattgatttattttccgagataggcaatggaatactggtctgcagcaaccatggcatcaacgaggtcatcggcagaaggaacgcttgccaagttatggctgctttcgccttcttgcaaagctgtttgtgcgacttttaataactcatcgcggcttatttcttcaatatgcaggtctttaaatgtcacaggcaaaccaagttttgacagtaattgaatgtaacggttaatctcgaattgattgcggtcttcccacgctagttgtgtcaatatgccaaacgagaccttttccccgtggcttagatgatggatatcgccatcaagcacggtaaaaccattatggacagcatgcgccaatgcgagacccccactttcaaacccgaggccgcttaacagtgtattggcttctatgacttgttcaagggcgtgggaaacaactccccgtttattggcttcataagcaagcaacccgtaatcaaataaaacttgctcacacttctcagcaatcgctaacccagcgatggttgcttttcctcctgccattgtagtgccacgcccttcaaaagaagctcgagcctcgacccaagtagcaagagcatcagcaatgcctgctgctaaaaatttcggcggagcactagcaatgacggtcgaatcgacaaggatcatatctgggttcttgctataaaaggaatagcgttcaaacacaccgtcctctgaatagatgaccgacaaagcgcttgtcggcgcatcggttgaagccgtggtcggaacaatggcacaggcggcacctttcaagcgatctcgaacccctttagctgtgtccaatgtttttccgccgccgattccaacgataatatcagcaccttcactttcggctttttttacaatccgcttaatttccgcttctgacgattcaccttcaaatgtgacttccaccacgtcaagcccaacttctttcaagctgtccgccactcggtttgcagctatcccccagacaaattcatcagctataagcagcgcctttttgcctaagtctttcacgtattctcctgtcttgtcgagaacccctctgccttgcacatacttgcttggactaataaaaattttctcgtccattctgcctatccctcctatcgatctttctacctatataattccacagatcgacatgatgcaaaccttttcgaggaaaatatataaaactagatcccctttatccttccggagatagaccgaacgcttgcttattcgctgtccctccgtaagatgttactttatgttataaaagcaagaaattatttaagctcttgattgtttcccttttgagggcgtcaccaaaaagtggtcttcaatatcggcaaaaacggctttcatatttaacacaatcaagaaaacaattacacttcctgtaaacaggataaaaaaattcgttgtgctagccgtgatgactccaacgataaataagattaacaaatttcctgtcgtttgtttcactttcgtaaaaccataataaatcgacaacctgaacagatcgcgcaccctgaatttgtagcgcgcattgattactaaaacgtttaacattaccattgtccacataatcaatagaacaactaggattgtcgatccaatttgacttatgtgtgatggcgatttgcgaaaatagtggaagtcgactaataaaataaagcagatgacgagcataggcaaccagatggaaaatgtatcttttagattttttttataaccttcaaaaaaatcccgtgtaggggacaactccttcgttctcacgagcttctccattgaatagcacatcgcagcaatcgcaggtcctgatggtatcaatgccaaaaagtataaaaggatgttggagaaagaaggttgcaatgtcatgaagaagaataaaaatacgctattcattaagataaaatagatatttgtcaaaagaaaccaataaatatagtttgtcaccgtaaacaagattccttgaccatattcttttttatcttccatgtccgttcaccccttccttagtaatttcatttatgtaataacatgatcggcaaaggctgcccttcaaaggagaaggacaacctcgaatactccgatcagttatgcttatagtcttggtatgtttggttggcgaggtcgacatacctttgcaatccttgtccttccaactctgttacaaacgtgtcaaattcatttaaatcacgttcccccaaaataaactttaatgtattttggtctgtataatcctttaatggtgtgctcaataatgtcgcctgttctctatcctctgctgtatagggaatgagcggttctaaaggaatcgtcgtttttatgtttgccatatcctcttgaaatttgatttcttcttcagtaaacattgaatggagcagctctgtagtccctccataagcaaagacgccgccagagaaaccataatcaacacgtaaatccgttgttccgtcagggtttaatccattgtaatttacatcgtctactaaatttcgcaccccatctgctttcgtataggtcgtgccttccacaccccattttgtaaattcttgcccctcatcactgtaataaagccaatcaataaattgcagcagcgcttcgaagttttcgctttcttttgctttagacgagatcatgacgccattctcgaagcggctgccagccattaaatggccggcagggccgcctggcaccgttatttttgcaattgaataattgccttcacctagtaatttgtccatgcttgttctatatgtcacaacgtcttgggcatttccattaataataaaggaatttccagaaacaaatttttgggtagcttgttcatctccctgtgtaaagctttctttatctaaaaggccttctttcaccagtttattgaaatatgtcaacagttctttgtattcgtctgtcgttgcgctatacacaaattgatcttttgactcatcataggttaagccattgccaaaaccccagcctgccttcgtgccaaaacctgttgcggcaatgcttagagtgctgttaaattcatagcggtcggaaaatggagtcacatcgggataaatgtcttttagcttcttcattgcttcgtacaattcgtcccaagtagttggcagcgcaatattattttcctcaaaaatatcggttcgcacaatcaatgtatactctggccatacgttctcatgcaagcctggaagaagataaaattttccgtcactttgtcgcaacgtttctaattcatcttccatttcccatttctcaattttatctttaaaatggggcattttatccatatagtcacttacaggaagaatcgctccagaagggacaaatgaggcctcttctcccgggtacgtttttgggataatgagtggtgattccccagaactaattaacaagtttcgtttttgggtgtaatcgctcattggaataatcgtcggatttagcgtcacatttgtgagttcttcgattttctcccacaacaaccaatcctctttataagggtaatttgggtggtcgctgtacatcatcgaaaactcaagcgcttcttcagctttaaatgtgtcgccgacattatacgattccatcgcccctttggaattcatttcttcttcgccgtcagagtctgtgctggaacagccggcaattactagtaaaagcaaagccgttagacaaaaagcagtccatttcttttttagacactcgttcatttctattccctccctttttattcgaaaagcactaagcttcttcttcctatctttagcggtaatgactgacaccattgctcgttagcacttaatttacttaacagaccctaacatcacgcctgagacaaagtatttctggacaaacgggtagacagttaaaatcggtaatatcgtcaggaccatcgtaaccgatttgatattggctgaaatctgtattaaattatctgctgatgttgcgcccgctgccgcgccgccagtagccccagcaatcatattccgcaagtagatcgtaacgggaaacaagtctttttggtcaagatacaaaaaggctggaaaccatgaattccagtgtcccactgcataaaagagaaccattgttgccatcacagctttactaagtggtagaacaattttgagaagaattccatacgtattcatcccatccattgcggctgcttcttctagctcatcaggcatattttcaaaaaacgatttcataataagcatgttataaatactaatcgctcccgggatcacaatcgcccaaatggtattatgaaatcctaagttattgattagtagatagttcgggattaaacctccattaaaaaacatcgtaaatacggcaaataatgttaaaaaacggcggccaactaaacgtctttttgacagtgcataagcaaagatcgtcgtaaaaaacatagaaatcgctgtaccaaccactgtataaacaacagtatttttatagttaatccaaaacattctatcttcaatcactgtcttatacgtttccatattaaagccttttggaattaaattgacttctccagcgctaatataagcttcactactaaaagattgtgcaaccacatttaaaaaaggataaagcgtacaaaagacaatgactagcaaaataaacacattgaatactttaaaaatcttgtactggatggattcctgcatatttcctcctccctaccacaagcttctttccgttaactttctagaaataccgtttgctgttaaaatcagtactaagcctatgatggattcaaataagccaatcgccgtcgcataactaaagttgctcgattccagacctactcgatacaaataagttgaaatgacatctgacgtttcataggtcaatgggttgtatataagtaaaattttctcgaaaccaacagccaaaaaactcccaatatttagaattaacaatgtaataatcgttggaagaattcctggaatggtaatgtgcaacgtttgcttccaacgattggctccgtcaatttttgctgcctcatagagagagtcatcaatcgttgttaaggcagccaaatataaaattgcaccccaacccatcccttgccagatgtcagaagtaatataaatggtccgaaaccattcagcctgctgaataaaattaattttttcacctgtaaagaattcaacgatcacattaatcgaaccgttgagagccgttaattgcaagatcatgcctgctacaataacgatggataagaagtgaggcaaataggaagctgtttgaacaaattttttgaattttttagccttgatttcatttaataacaacgcaaaaataattggcattggaaagcaaatcaataacgtaagcccgccaagcatgagcgtatttgtaaagaccttccaaaaggtaggatcatgaataaacattttaaaatagtgaaaacctacccattcttccccaaacaaatggcccccaggaacaaagcgcctaaatgcaatgacatttccaatcatcggaccatatttaaaaattattaagtaaataagcggtaatagcagtaaggaatacagttgccaatctttccgaataaccgttcttaatcgtgtcagcttacgcatttttgtccctgtcaaaacatgcgcatttctagctttgtctatccctgccatgtaaccctcccctaactttgataaacagctttcctacgttacttatttgacagacaataggttcaggcgcttacggtccccctctgccaaaaaaagaaccgccgtcccctaatgaaaagtgcctttgacagcacagcttttgtgattttcacttataaattgttctgccacgttcgtcgtttatccccgacatccggtagtaatacgtatttacttggtcgcgccattcgcgggcattcgctaattgagcttcaaacctttcttttacatgcatataaagaccgtcaggcattgcttccttctgttcctcccatgcttctagaaacgcttcaacctcctctacaccttcaaaatgggcatcataaatatgttggatcacagtctttccactttttagcatatgggtataaggaacatggtgaaaaaacaacaacaattcgtctgggcacgtcgctacatttccatacaactcggccacaggttgtttgtattggctaatgtaatgacttccggttttcgtacggtcaacccctaagccgtttcggtcagagaaatggtacgtcccccacggcgagtattcatacccatttacatttggcccataatgatggcctgtgttgaccatccaaccgacaccaagaggggctgtataagcttcataaacagaccatgaccgctttaaaatcgaacaaatcgtttgccgcacctcagctgacaagtgcgcatacgtccgctttgcccattcttcggcaatctttcttgggcactgctcaggattccaggcgagttggccataaccgtataaattggcttgggcaaatggatgccccgtccagttttgattgtttcctatgtttgaaacagctgttacgcctttcccctttccgtcctgttggcggctagatagaaggtcggctatttttgtgccctctccatttgcatgtgtgtcgaatgaccatatttcttgccattgcattggcaaataacaaacatctatttgctgcccggtgtattcctgggtaatttgtagttccatgacgtagttcgtttgtgttaatgctccaaataggggcgagacaggttcccgcacttgaaaatccattgggccgtttttaatttgcaaaatgacattgtctgcaaatgtcccatccaaaggagcaaaatgctcataggccgccttagccctatcggtcgaacgatcacgccaatcttgcaagcaatcatagacaaaacaacgccaaaacacaacgccaccatatggttttaatgcatcagcaagcatattagcgccttgtgcatgcgtcctgccatatgtaaatggtccaggccgatgttcggaatcggcttttatcacaaagccgccaaatgtaggaatgtacttgtatatttcctcgacttgcgttttccaccagtgaacaacacgcttatcaagggggtccgctgtttgcaaatgccccagtgtcatcggactggcaaagtttgcacttaaaaaaagcgtaatgtggtaagcatcaaataagtttgctacttttgccaattgtggcagccacttttctgtaatcagttctgtttcttttgcgtggacatttacattgttaatagtcaaagcattgatgcctatggaagagagcatttccgcatattggacgatttcttcgtctgacgctgcccaggcattgttatcaaaaaaaagcgatttccctgcataccctctttcaaccgaaccatccaggttatcccaatggttgatcatccgcacttccatcgcaggctggtcttccgcttccatcgttagcaacggacacccttgttggcttttctttagaaactcgtaaaagccatatagcacgccaaattctgtatcgcctgcaatgattagttgactgccgtcagcgaatatacggtacccttcttgatggcccacccgttcgctacggcccaagtcggcaaatgttcctacgattacatttgcaaactcggcatctactatgtccacatcggcaaatatccgtggcaaatatgtctgcgccacctttttaatcgtgtccaatctaaaaccattccctactacggaaatgtggactttttcggctcggtgcccttgcccttcttcaggaagccagcaagtatctcttgctctagttttctcttgaataggcatactcccagtcacccttttctttttcgctcgtttatttccaatcccttgctctaatgcagaagtccacggtggaaaagcgcgctaacgacgttggcgtcgaatggagaagccagactggcaagcatttatacgaaaagcgattgtataaacttccttcccccttcgatatcgtttgcttttcacttttccaagcaatcgtatgtcgtctcctagtccgtcacccatgaatcacacttttcctagcgcttgtacctccttctgcttgattgagactgttgctctctaactcgtgataagaaaacgagtggaaatctgcatgtttacgtacacctgacgtgtcttggcaatgcataccgacaaacgctcctgtaaaaaacccaccatgggcgatgtagtcgtcagaaagtttataggtgtcaaaagaaacgccaatatcctcaaaatggttgccatcaaaagaataagcaaacgagaatgtatcgtaacggacgctgactttaaggtggacagtggctgcctgttctggcacaacgatttcactgccttgcaatggctgggagacatgaaaatggtcgcattggacaagatctaaaatccgtcctttctgctcatgccaagttacttgaagcgaaacccaattttcagtatcgtaatagcaaattaacccggctgcctgttgaaacgtttctgggtaaaaagatacttccgtcgcagcgtcaaagtgaaaactttgccagcggcgggcgacaagtgcttgtgtatgtttggagtggagtgattcccgcccaaacaggcgcagaatgcccgcttcatggtcgatcataccaatttcctcattaaatggaattcgcaatgtttgatagtggtggtttaacaccgggtgatcaaatggatcacactcgggatagtcttgtggccattgaacttctggcaattttggtccagcgacttctactgatggcaaagggccattgacaacataaggccagtcatctttccactctattttttggatcgccgtttcacggccaagtgggcaaaagcctcgctcctctaagagcttcttcccttgcctcttaatgggccggcctaataagtgagccatataccagtcgccatgttgcgtttctacaagagaggcatggccagctttttgcaacggatggcttggatctgcccagctcgacaatattgggttttgtggatggacttcgtaagggccataaatatctttcgagcgggcaattgtggccgcatgctcatatttcgttccaccttctgctgtcagtaaataataatagccgtttgcctggtaaaggtgaggggcttctgttaaccctaattccgtccctttaaaaatcatttgcggtttaccaactaatcgtttttccaatacgctgtattcctgtatgcaaattccataaaaacgatgattgtacacccgttggtcccacaccatattcaccacatacttacgcccgtcttcatcatggaataaagaaggatcaaagccagagctgttcaaataaataggctcgctccattccccatcaatcgtttcacatgtcacaagatagttatggccgtctttccacgtattgccttccactacttttacatcagagtaaacaagccaaaatttcccattggagtagctcaagcacggcgcccacacaccaccagaatcggggttgccaatcatgtttaattgactgatgcgattaagtggccgactaatgaggcgccagttgactaaatcacgggaatggtggatttgtacaccgggaaaccattcaaacgtggaaacggccatatagtaatcatcgcccacccggcaaatactcgggtctggattaaagccttttaaaacagggtttcgtatcatttgtccgctccttattcatttttgttaccgctttcattttaccaaccaattagagggaaaaacatgtacgtttctgcgcattatttacccatacctgcacaaaagggcttcaaacatgggcctgataaaagccagattcagagtgaaaacgaggggaattgcagatcgaacgtttactcgccagaaagcaaagctctgatacgctccctcctaagacgagagcagacattgtggcatgcctgctccctcgtaaattattttcagtaaagtgactcatgtttggcgcggaactggcttggtgctaggccagtccagcgtttgaattggcggctaaaatgggagatatcgtaatagccaagttgatcggcaaccatttcaatcgtcacatctttttgcaccaacagcgcttttgctttatttaactgtttaaaggaccaatacttgcgcggagacatttggtatacttttttaaacaattgattgcaatacgaaacacttatgttcagttttttggcaatttgttcaatattgcttttttctaactgtccgcctccctccaagttgcgctcaatttgctccgctatttgataggcgagtgcaacgctccgttcagaaagacgcttgccttctaactcttcgagccccagcgcaagcatgcccagcatttcaaacatcactgcttgcatattcattttttcgacgaggccaaaggtatggtgccccagcaatttagcaatccgttcgagaaatggcgccatttttttggcgaggctgccactggctttaaaaaacaatgggtcaatattggttaaataaggtaaaaacagtttgtcatcaatattaaaatgaatgcataaatacgtgaaaggctctgtatttccacctttgctggcatgaaattcccctggccttacgagcaccaagtcaccagcattttgttcatggcgcttcccattcgttgtaaaaatttgctgcccttctatgacccaattgatttcataaatagcatgctgatgttctgggtagaaccatgagcccttcactgtacgaacatggacgccaaacagttcaagttccgttttcgtatttgggtaaaccgattcgctgattaaaaatcgtttgattatatcttcacttgtctgcccgttacctttaaaaatgaggttcaaagcgctctcctccatttttctccattatagcgacaaactcttttaggaaaaaggcgcatcgatttgttgcggtaaagtgtaaaaattttctcttgccaagataagttgcttttgctacacttaatttcaacaactttaactgtatacgaattcttattaagaggagcagagggactggcccaatgatgcttcagcaaccccgccatgagcggaaggtgctaattccagcaggactacgtcctgggagataagagattgaattgaacattcacccctctttctttccaggaagaggggtttttcgtttttcttaaaagaaggccaaatccgttgttgaacaagacttaaaaacccagtaagcatagctgtttacttaatttaagaggaagtgaattttcgtgattgaatttaaacaagtgacaaaaacatttcattcaggcaaccagacagtcactgccctcgacaacgtgaatttacatgtcgcccgaggggaaatttatggtgtgattggttttagcggcgccgggaaaagtacgctcattcgaagtgccaacttgcttgagcgaccgacatctggcgaggtcctcattaatggtgttaatttggccacattaaaaagccgagaactgcaaaaggcaaaacggaatatcggcatgatctttcaacattttaacttgctccaaagcaaaacagtgttcgacaacgttgccacgccattaaaattgacaagaacgccaaaagcggacattcgcaaaagagttaccgaactcctgtcatttgtcggtttatccgacaaggcagataactatccagaacaattgtctggagggcaaaaacagcggatcggcatcgccagagcgcttgcgacgaacccagaagtgttgctttgcgatgaagccacttccgctcttgatccagatacgacaagctcgattttacacctattaaagaaaataaacattgaatacaacattacgattttaatgattacacacgaaatgtcggtcattcgcgagatttgcgataaagtcgccgttatggaaaaggggcgcatcatcgaggaaggatcggtgttgtcgattttttcaaatccacaacatccgacaacggaaaaattcgtccgctccattatcccgactggcctgcctgcccgtgtcaaagaagcgctgcagcagaaagagccgaaccggcgcatttatgaagtgactgtcacaggcgatagctcccactcagatttgctgcgctcgttaatccagacatttggcattgaagttgacattttgcatgcgacaatgaacgacattcaaggcacatcgtttgggcggatttacttcgacttacgggccgaaccagaaatacttgcagaagcatccaattacttaaaatcgcatccgcttcaaccgaaggaggtgacaggcgatgctcgagtggctgcctgaagcaattcgccctaatattacaagcgagctattgctcgaatccttatatgaaactgtctatatggtcggctggtccttgttgttttctggggtgatcggcattttgcttggtgttacccttgttgttactcggccagggcacatactcgaaaacagctttgtgttccatacgctcaacccaatcattaacgtgctccgctctgtgccttttatcattttgttggtggcgctgattccctttacccgttttttgatgggctctgcgattggaacgacggccgcgattgtgccgctcgtgttttacgccggcccttatattgcccggttaattgaaaactcgctgcttgaggtggaacctggcattattgaagccgctgacgcaatgggcgcatcaaaagcgcaaattatttttcgcttcatcttacccgaagcgctgtcttctttgcttctcagcttaacaacagcgacgatcggtcttgttggcgcgacagcgatggcaggagcaattggcgcaggcggaattggcgacgtagcgatcacatatggctaccagcgttttgacaatggcacgatgctcatcacagtattgttgttaattgtcattgtccaaggcttgcaatctttaggaaacatttcatcgaaacgcgtccgtagacgataaagagacctacagatatgaaagaggagagaaaccatctatgaaaaagacagttacgaccgcatcgctttccattttagccgcatttgccctcactgcttgcaatgctggcgcagacagcttagacgaaacgacggactacagccccgacaatcctgttagcgtcaaaattggcgttactggcacagatacgccgcaatgggacttcattgctgacattgctgctgaagaaggcattgaaattgaaattgttcgttttaatgactacgtccagccaaaccaggctctagccgacggcgaaatcgacgccaatgcattccaaacgatttcctattttgaccactttatcgaagaacatgaccttgacttaacagcgatcggttctacagtgcttgcgccaatggggctttattccactaagtatgattcagttgacgacattcctgatagtgccgagattaccattgataaagaagcgacgaaccaagcacgcaacttaatgctcttgcaagaagcaggcctgcttgaactagaagatgacttcggcgttacaagcggcgttgaccaaattaaaaacaatccaaaaaacattaaattaacggaaattgtcgctggcaacgctcctcgtctcatggaagacgtggatgcagccctcatcaataatggcattgccgttgatgccgggctcgttccacctgaagatgcgattgccttggaaagcgaaacagctacgccgtacattaacatcatagcggcacgaagcgaagacgcagacaaccctgtcctacaacgcattgtcgacatttaccaaagtgatgaagtcaagacgtttattgaagaagaatacgcaggcgccactatcccaacctacatttcactggatgagttaaacagttatccacgttaaggagcgaaaccaatgccgacctatacttttgcaaagcaagcaattgaatcagcgattgacagccaagcagaaatctttattcgcacaagccagcaaatccatgaaaaccctgaaatcggcaatgaagaagtgtttgcttcttcccaactaacggagctccttacatccgctggctttagtgtcaaactcgatgtggctggccacaaaaccggcttttttgccgaaaagggcgacccagctggaccaacgattgcttttctagctgaatacgatgccttgcctggcattggccatgcctgcggccataacattatcggcactacaagcgtcgctgcagccattgccttaggggaacaactccatgaatcaggtgggcgtgtcgtcgttctcggtacaccagctgaagaaggcggcgacaacggcagcgcgaaaggcagctttgtccgtgaagggctcttagctggcatcgacgctgcactgatgatccaccctagcggagagacacgagtatcaggccgttctctcgctgtcgaccctgtcgattatgtgttccatggcaagccagctcatgctgccggtgcgcctgaaaaaggcattaacgcccttgatggggtcattcaactttttaatggcattaatgcattgcgccagcacgtgaccgatgatgtgcgcattcatggcatcattcctgacggaggcgacgcggctaatattgtccctgactatgcacgggcacgcttttacattcgcgccaatacacgtccaaaaacagacatcatccgccaaaaaatcgatgcgattgcccaaggggctgcccttgctacaggggcaactcttgaaattgttgagttccaaaacaaagtcgacgacctgctgccaaacgatgtcttaaatgaacagtttgtttccattttcaaagagctaggcgaagacgtccaaacagacgaacgtgacggcctcggctccacggacacaggcaatattagccaagtggtgcctacgatacacccttacattaaaatcggcccagacgatttagtcggccacacggttgccttccgggaagctgccgcttcgccccaaggcaatcaagcgctcattaccggagcaaaaggcctagcccttatcggctttcagctattaaccgaggcagaattgctggcaaaagctaagcaagaacatgctgaacggaaacacgcagcagcacaagcagttgtataaccaaaaaggagtgccccagttatggcactccttttttatcttaagtacgttgattgatcgctccttagcttcctatcattatgccatttttgcaaatctcgggcccataaagaatcggcaatcactagctgtttatcattgttctaactcttctacaacctcttttaatgtttcgggccggccaacattgccaggaaaaataatgtacgtcgcatttgcaaatttgctttcgttccctgttttccatacaggaatacctggttgtatttgtcctagcacttcagcgcgcttaacagccaaccctttcgtgccgatactgctcgatgtgatgccgccttttgcgacaatgtatttaggcctaacttgtaagtcacggacaatactcgtaacggcatcagaaatgtttactgccaattttaattcttcctccgcctgattgtcacctaaatcaaggcgttctcgccgcgtataacagactaccgatcggccactagcaatagccacctcgcattcacgacggactctggcaacttcccgttcaaattgatcaggataaagaactagatggacgtcgaattcaaccccttctacgagtccactatcaagaagttgttgcaactggtctgtcgttttttttacatgggaaccgacgataacaaggcctccgttcgttgctgcctcgtcaacaaggtcgcctttctttaacagcggtttatcggccacaccgccaagcacttttgtcaacgaagcggcgctgcggacgagaaaatgcttgcctgcttttagagctttcataaaggcggttacaaagatctcaacatcgctatactcgacagcattgacaacgattttctgaaacccttgcgctttcataagctgctctttgacatcgtcgacttgtttttcacgcaaatcttgtaaacgaatatagatcgtctgttcttttgtatactcgccttccgtcttctcttcaatccactcgccaaggtgagaagctgaaaacgaaaatgtccggtctttcgcaaactcggtttccccggcaggaacgagcgactccccgtcttggacatagtggacatcgccgattgtcaatcggcctccttctttaaaaaacggcatcaccacttcaccgtcaaaacgaatttccgacatgccttcaatcgtctgttttaatacgtctgtttccagcggataatggccacgaagcgttgaatcaccacggcttacgagtacaaacggaatgccctcttcctcagagatgcgctgcacccgttccgcaatttctttatggcaagcggtcgtctcgctccgggtaaagctgcgcgagttggtcagcaaaaagaaaaggcggttgctttcacgaaagcctgcgcgaatggatgtttcactccaatcggtataaacagaaacgccgtgaacggtttggatgcctgtcgggtcatcatcaagaacaatcattttataaagagattcttttaattcttgctctaatgactgctgtacaagcgtacggtcaatggcgggaagcgtgtttaaaaccgtttttgcatgtaaatgtttcattgtttcaatgcctccctctccactatgacattggccaatttttcataatgttggacaatgcttgcatggtcgagcgcttctttcccatcggcttttaatgcatggaaaatctccagcagttggcttgataacggcaacggtacagacaatgcatgggctgtatccatcacattagtcaagtcttttaaattaatatcaacccgtccgccagctttaaagtcacggttgaggatcattggcactttggcatcaagcaccgtgcttccagcaagcccgccacggattgcttcgtacattttttcaatgttaatgcccgctttggctgccagtgccaacgcttctgaaacggcggcaatgttcaaattaacaataatttggttggctagtttcgcagtcgctccacagcctgattcgcctacaaggacaacgtctgtccccatcgcagcaagaaccggtttaattgattcaaataccgtctcgtcgccgccaaccataattgccagcgttccgtcaattgctttcggctcgccaccgctgacaggtgcatctaaaaagacaacgcctctttcagaagcttgttgtgccagttgccgcgagtcgactggtgaaattgaactcatatcaacaatcaccatgcctttctcggcaccttccataacgccatttgcgccaaatatggctgaacggacatgttcaccttttggcaacatcgtgatgaccacatcgctgtttagcgctattgcttttccagaaatagctggaaaagcaccttcttttgcaagcatgtcgattcgctcttgctgaacgtcatacactgacaccgtatagcctttttttagtagattgcgcaccattggcgcacccatgattcctaatccaataaagccaacgcgtgttttcatttctaccacacctttatctctctttatttataaccctggcatgtatgccgatgcgagacttagcaaataaatgaagccgagcgctgtcactcccgcaacaaaaccgccaatactccacactttaatcgtttcgaccatcgataggcgcccaaacttggaaacaacccagaagcctgaatcatttggcaaggaaagcccaatgcccccagcacaaattgcaagcccaagcaaaaccggcgatacccctagttctccggccattgggcctagaatagacgacgttgtgatcaaggaaacggtagcgcttccaagggatgcccgcaaaatttgcgcgaacacaaatgcaagcagcagcgctggcatattcaagccttgcatcacggcaatcagttgatcgccaagccctgtctcttggacgactgaaccaaacgcgccaccggccccagtaatgagcaaaatcatgcctgaagcttcaaacgcttgatttaaaacgacttttggtttttcacgcaaataaggcttcaatacataaatgccggcaataacactaattaaaagcgcaacatttttatcaccgactaaagcaaaaacagtcggcaagaaagcgtcttcattgccacgaaaaataatattattcattaacgtattcgctaaaatgagcacaatcggcaaagccagcatgacataagacaaccatgccgaaatttccttctgttgttcaatgtcggccgcagcagcaatttccttttcagcatctgctaaacgctggcctgtggggatccgccctccaacggtcttgctgtaaatgacgccgccaaccaatgtggccacaacagcaacaagcaagccataaagaaaaaagacgccgatatcgacaccggtttggtctgctactacaagtgggcctggcgtcgggataatgacgctgtgtgaaacgattagcccgatggagagaatgccaacaagtgtcgccagtgacagtttggttttaagcgccaagctttgcaccagtttgtttaaaatgacaaaagcggcatcaaaaaacacaggaatcgctaccgttgttgctgttgcagccaatgcgtagggcgagtttttgacaccaaatgcctttagcatcgagacagcaattttctcaatcgcccctgaagaggcaagcagctgcccatagataatgccaagacctattaaaatcccaacgccagctaacgtattgccaaacccggtagcaatgatgccagcaagttccctagtcggtattgcggatactaagccaaggccgagggcgacaacaagcaaggcaatataggcatcccatttaaatttaataatcaacaaaaacaataatgttagggcaatcacaaagccaacaattaaactgtacccctctaacataaacacacctcaacttttgaaagcttctctatttcgatcgacaggcgctatttcttcatccgcgtcacggctaagcgcgacttatttacattttcctttccttttggcccagccattgccgccacccgtaaataaagcgtatcgattaatgccagttgaatgacacgggaaaccatagcatcaggttgcctatttgtttcagccgcttgcgtcaacagcaaataatcagccatcgaagcaagtgtcgtatttttgttcgatgtaatgacaatgaggcatgcaccattgcttttcgccatatcacaaacattgatgatatcaattgtttccccagaatgggatatggcaacaacgacatcccctctatccatatgactcgcataaatcgcctgataatgggggtccttcactgataacgtcatcccccctagccgcataaacttgtgggcgccgtcctctgcaattgttcccgataagccttggccaaagaaatacaagcgttttgctgcgtggagtttgccaatcgcttcctccattttctctaactctattgcatgtttggtcatcgtcaaagctgctgtaatctgttcactcattttgacaaacaccgtatcagccagatcctcagccttaatgtcagcgctttcttttgatgccggtttgatttcagctagttcctgagcaagcgcgacttttagctcttggtagctgctgtagcccaactttttatataagcgaacaacgcttggttcactcactttgcttaaaagcgccaattcattcatggacaacaaaaatggcttttcatgcttttttagttgagtaataattttcttctctgaacctgtcaatgacgcttcattttgtttaatccgttcttgaaaacgagccaagcaacaacacccccttcaatgttagtaagtttactacaaaataaccgcttacacaactctaaattgctttatatcctctattctctgtaatttaactacaataaaggctttattctgtttgtttcactacattaaattactatattatttatttttccctttatagaagaagagtatttcttggcctattgaccactttttacgctgatacatggaattttaggctataccgaaatatcttatttattcttttatttcattaataattttcattgaaattattctaaatttgggttgactcgtaaagtttatggatgttaccgtatatataacagaaaattttaaaagggtgatacatcttgaaaaatgcatctcctattacgattgtgtttagcggtttaatagttggtgttagtatcgcactactttccatcactatatttacagtttttaattttactattcacgcacttgcaaccatcattttaggattaatggcttttatcttttttatcttgacagctctaatcattaagaaactcaattaggttttaaaagccgtaaaacggcttttaaaataaaacaaacctttgaaggagtgattggatgcaagggctaaacacgccgataacaaacagaatattcattttattcttcgtattctctttggtagtagccaacatgttttctatggtgggacaagcttctgcccatcagaatctatctacagagagttgtgactgtggtgcagaagaagatgtttcagagaatgtttcgattgaagagattaacgctcaatcagaaggggttcaattcctagaccctagtgaagcacttagtacactaaaagggtttgaaaacagcataggtggaactgaaaacgactattctaaagctgtccagtggttgaaatcgaaagggtttgagaggatcgaggatagtgcaggaactgttgggtatgataagcttacagttgtatctggaactgtaaatgatgtatacgagtcaaaagttatttttggacatgagaatggtaactcaattgggaatattgatgttgtatatgacaaggaatctaatgaattaatacatgtgcatgcacagtattttagcggaatcgtagaaggtacagaagagtttacattctcagaagcacaatcatttatttctggatatggctacactgacgtacacaacgatgcagaatctctagaaaatgagctaaatgagttaagaggagaggctccggctaacgatttgtataattcaaataactcggagtattgcggttatgctactcaagctgtatgtatataccactgtggagtttcatgggctttagcttgttcagctggtgggctgaaaacagctattatttgtggattgagttgtagcacaatttgtggttttggtacttcatggctgtgtaaccaaatttaattacacaatagtaagagtgcagaattatgactgcactcttactgtatatagcggattaaatcccaaagttattaagtgaattcccccttggttagagtgttgacctggcttgccgtgagcctttactggcgtgatgcggatgaaggaactcggggttgaaacggcctcattatgatttcttttttgtacaaaaatactatttaaccgttttatgaaaagtcgtgcgcaataaacttatcaagataacagcggataacacaatattaatcacgaataaaaaccgaatattaaggaactctgcccataagccgccagcgataatcccgagcggcatcgtcatttgcacgagcgttgctattgagcctgaaacccgtcccagcatctgattaggggtaatctcttgccggacagcaagataaatcacattcgatacgcttgtggaaaaattaaataaagccatagcaattgcaatcatccaccaagaggtagcgaaagcaaggatcgtaaaagcaaccacatcaaacatgttcgtatatgtatagattttccctcttggcaagagtgtggctaactttttaacaataagcactccgacaagcccgcccgctgcaccaatgctaatatacaagccaacttgtgcttctgttgcttgcagctgatcgactgcgaaaaagaccaaaactcccatcatcaaactaaagccaaagttttgaaaaaagatcacgacggttgtcacttttagcagtgaattgttaaagagttcatggaacccttctttagcatctttccaaaaggtgatcttttcacgatcttctagcccctctatttttagagagggcagcagtaccgtacatagaagtgttagtgttataaagacaagctggacagccatagttccagcaaagcttaaggcagcaagcgttaacccagcaaacataggtccaatcaagcgcacaacgtttgaaacgatgcctagttttgcatttccctcagttagctggtctttctgtaccacctgtgggagtgcagcatgtgtggcgtttgtatgtagaagaccggacgtagcaaagaagaaacctaggaagtacaaactccatagctgtacattttcaaaaaacaaaagtaatgttaaaagagcgattgtcacccattgaagccccgccgctgtaacaagtacttttttacggttgatccggtcaaccaaaatgcctgcagcaacccctagtaggccacttactaaaaactccattaagcgcattgtactaataagcaatgcactttccgtcaagtcatacatcaataaaggaatcatgacaatatacatgtaaagccctaagttactagttgcatcactccctaataacaataaaaaagggcgatttttccaaagagagtgtgaaggctcgatcgatagttttcgttcccgattccccaagtagtaaactcctcccccattttttaagccaggattttatacaaacttcttcaaatcctctccaacgaaaaatcaatgtacaaaaaagcgttgtggagggttatccttttcctacacaacgcatgttaactcatttcgactgtttaaggaggactcctttttttaacgcttgaaaatttccggaactgaaaacagcgagttatgaaattcactcaaaaaaagttagtttggcagagttatgatcaaatttttagtaaaaacaccccgacaatgaagtgaatcctcattttcggggtgttatctgcttttttaccatttttacttaaaaatgaagtaaaaaggataggcacgcttaacaataaaatgctacccacgccaccaattgataccactcttattacatcttttttactgtgctttcacatcttggctgaccagcgctttcgatctaagcggagccgaatccgaaacaccctttattaagtacacgcttactactacgtttacacagcaagctctgaccgcttccctgccttcatgacaaggccttcaaggcgttttcccatccacttttcaacttgttgggcaagtgtaataaggccatccaggtcggtgcctgtgtcaatgcccatttcatggaacatgtggactaagtcctctgtacaaatgtttcctgtggcttttggcgcaaagggacagccaccaagacctccaacagccgaatcaaagcgtctgacgcctgcatcataccctgccactgcattagccagcccgagcccccgcgtattgtggaaatggaggcctaaaggaatatcctctccaaatgtacgatagaacccacgaacagtttctgctacttggcgagggtttgccatccctgtcgtgtcagccaagaccatttccgttgcaccagctttaaggaaagactcgcataccgaaaacacggtctccatttgcacgtccccgctaaaaggacagccaaaagaagtggaaatgaccgcgacaactggcaagtgggtacttgcctcgcctacaaccggaagcaaatcgcttaagccttcagcaacggttttgttggcatttctcttattaaatgcatcacttgctgaaatggtaatatggagaacgtcaattggtgtttgcaatgcacgtgttattcctgaacgagatagcgctaatccggcgatgcggacaccttcccggcgatgccatgcggccattacttcttcggcatcagccatggccggaacgagctttttgtttacaaaggaaacggcttcaatttttgaaatgccagaacgagcagcgtgttccatcatctctattttttgttccaccgacagccttacctgttcattttgtagcccatctctaggtccaacctcacaaatctcaaccaaatttgtcccctccctcgtaataatgaagcacataatccctgcctttgaaaatatgttcgttcattgccgcttttgcccgttccccatccctctcttcaatcgctgccacaatcgttttatgggcagcgagagactgctgcaacccttcttcgccaaaccaataaaaagatcggtaaataaaaggcaacacgactacttttgcgattaattcttggatatgctggttgcggctcgcacggtataccgcatcatgaaattgagtgttggcagcaatgaccgcactgatccgctcttcatggggcaaggacgaatccaatatcgtttgttcatactggctgtttgcttgttggatggccgccaaatcttctgattggtgatgtagagcagcttgcccggcgccatagctttcaagcattgcccgtaaatcgtaaatttgccgtaaatcttcttttgaaaaggagcggacgaaaaatccccgttttagcggttggactagcccatcaaattcaagctgttttaacgcgcttcgaataggcgtcctgctcacattccagtcaatcgaaagcgcttcctcagttaggcgttctccttgtttgtagcggccagttatgatggcctctttaattagttcgtatacgctcattgccacacctctttcaaattagtgtagctgatgttcccaatgatggcaacgcttaagttgtatacaaaacaatccccactcgatcttagtaagtattttccctcatcatacactcactacaaaaagacgaatattaacagaaagaaactctgtttaaaatcgacattgacgcgtataacaaacatttaactggctaaaacgtggttatcattcgcctttaaatctatttatctctttaaattccaatattctatactaggtaaaaagactcaatatctaatttttctaacaaataagatagactttttgtatacaaagtgatagattgttttaaaagaaagcgctaacaacaggagggtatgtatgtcacactcaacaccagcgcctttaccattggacggcattcgcgtgcttgaattaggatctttgattgccggcccttttacgggcagattgcttgccgactttggcgcagaagtcattaaaatcgaatcaccggataagccagatcccatgcgaaagtggggaaaacataaaaatggcatcgggctgtggtggccgatccaatcaaggaataaacgctccattacactgaacttacgggaacaagaagggcaacaactctttaaaaagctttccgaaaaatcggacatcatcattgaaaatttccgccctggcacgatggagaaatggggactctcgtatgaaacgctttctaaagaaaatgaagggctgattatggtacgcacatccggtttcgggcaaacaggaccatacaaaaaccgtgctggctttggtagcgttggcgaagcaatgggcggcattcgccacgtaactggctacgaagaccgtcctccatcccggattggcatatcgattggcgatacactagcggctttattttcggcaatcggctgcttggctgcattgcaagagcgcaaccgttcaggcaaaggccaaatcgtcgataccgcgatttatgaatcggtctttgccgtcatggaaagcacagtgcctgactacttgctcgcaggggcgatccgtgaacggatgggcaatacgcttcctggcatcgctccttctaacatttatttgacaaaagaccgtaccttcattgtcattggcgctaatgcagatggcgtgtttcgccggctttgtgaagcgatgggcgaaccggagttggcaaaccatcccgattactgcagccatgaagcacgcggggaaaatatgaaagcgcttgatgaacgaattgaaaggtggacaacctctctttctgccgaggaggcgcttgcgattctcgaacaaaaaggcgttccgtctggactgatttattcggcaaaagagatggttgaagaccctcactaccaagcgcgggaaatgattgtccacgtcgatcaccctacacttgggccttttccaatgcctagtgttgttcctaaacttagccggacgccaggagcgatcaaacacactggctctcttgctcctggtagcgataatgaagccgtctacgggcagttgctgaaccttgacaatgaggcgttatccgctttgcagaaacgacaaattatataaaacggaggtgccaaatggataagaacataaaagaacctgtgaaaaagccatggatttgggtggtaatgggcttgctcgtcctttttaacgcgccatggtatttgcctcggggtagcgctgagccttttatatttgggttcccgtattgggctgtgattaccattatcctctcactcgccctatgcggctatatcaattggttaatgtttagccagtggaatattgttgaagacgttgaagaagaatccgacgaagaaagaaggagcagcctatgaacttaacgttttccggaacagacggaatcattattttatgtgcgtacgctgtcatcacgttattgattggttggtgggcaggcaggggcgagaaagtgagcaatacactcggcgattattatttagcaggcaaaaacctagggctgattgccctatttttcacgctgtatgccacccaatatagcggaaacaacgttgtcggctatgcaccaaccgcataccgggaaggcttttcgtggctgcaatcgattccttttatgacgatcattattggcatgtatttgctaatcgcgccgcgcctttatgtattatccaaacgttttcaatttatcacacccgctgattggatcacacaccggttccgctcaaaaagcgtcacgcttctcgctgttgccttaatgctttgggcgctttgcaactatttgcttgagcagcttgttgccatcggccatgcggttgccggcctaactggcggggcgattccgtatgaatatgcagtgatcgggtttattcttgtcatgcttgcttatgaatggatgggcggcatgaaggcagttgcctataccgatgtcctacaaggcctgtccttattagttggcatcattatcttgctaattggcgccctcacattgacaggtggcaacttcgcggaaatgacacaagatttagcaaacaccgttccagagaaaataggcgtccctgacacgatcacatcgatcaactggctaagcatgattgtgctgatcgggtttggtgcgatcatctatccccatgcgattcagcgaatttattcttccaaaagcgaacggacgttaaaacggtcgctggcaagaatggcgtggatgccgccagttacaactggttttgtgttcatcgtcggcattatttgcctttccctgtatccgaatctcgatgttgcccagtccgaacagctgattggcatccttgccaatgatgtagcagccttaaacagcatctattattgggcaatggtcatttttttcggggcgatcgtatcagccatcatctcaaccgccgattcggctttgcttagcttttcttcgatcatttccaaagatatttatggcgaatacataaaccgtaaagcaacagaagcacaaaaagtaaaagtaggcaaagttgccggtgtaatcgctgttgccttgctgctatggattgcttggaaccctccaggaacgttgtaccaaatattcgtcttgaaattcgaattgcttgttcaagtgttcccggcatttgggcttggcctctactggaagaagcttgcccctaaacctgtttttatcggcatgttagctggagcgctcctcgccgggctgatgacactcacaggcaacaacaccttttacggtattcacggcggcgtgcttggacttgctttaaatgtctctatttgtgtgatcggttcactaatcgcgccagcttctcatgaagaacaagagaaagcaatcgcacgaacggaattaaaagtcgcggacttccgtgacaaaaaagcaacaatcggataaggcctattccactgcatcgtgcttgtaaaaatcgagcatcacatagaccgcggcctcaaaacactcttttggggccagtgcttttacatgaatttcgtttgtttcttcaattagactatagtcgacgtaccacatgaaccctttgctgctttttagaaagaaattaacttgaatgagctcactttcatcacgggtataatgagagatcatcatggagatgttgtccagtgaaaagccatggttgcgaaaatcatctaaaaaaatattaaagttctccggataaatttgatcacggataatcgcatcaatttcctcgcttgtcgcttgcgaaaacagatcaaacccttgggatctcagcctaaaattctcgggcaagtcaacgtcctcgtctgctaagccaaagaaatcagccatacgctcccatagcgaatccgaatgtttgcacagctcaaaacgatgctccatgcctttaaacgtttggacaatcatttcgtccccttcaatttgatgaaaaatcaacacatggttcccatggacacagcgtgtttttttctgcgatttgatcagcaagtggataaaactttccaaccctttgacaagattgctagagcgtgtttcgtcccagtaaccacggttgtttaaaagggtttccgcctggtttgaaaacgtaacaagctgctcctccgtttccgctaattgcaattcatttataatatctgcagccgcttcctcatacccacataacactaacgcagcaacaaattcctctgtcgaaagggcgatttgcttgtcctgtatcatccattccacctcaattttttagttttatttgtatagatttatctaaatgggcgataaaaactgttttggttgtctttttcaagcgaaagtaagttatgggaggacagaatgataaaaaacagggactaataaaacaagaattccccctatagtaaaaagagataatactttcattacgtctttcttttctttattgtccagaaagaaccccccaactcctattgttatttccaagatgattcgataaaaaggggagtaaccttccctccaccactctcccttttaactacgatcaactacgctttacgtttccctttttttacaagccaaacatattaataatcccacctaatacaagaaaataccagatacacaaaagcagcgtaatcggcctctgaacgtagaaaggaaaacgggataatagattttgaatctcgccattcaatccacagaaatagatagcgatatagcgaaagccctcactccatgccgttttcgatttgtcatatgcattcgctgcataaaacgtcaacacataacttggcatgatgaaggataaaaaactaagcgaacaattaaccataagaaaaaccgctaaaattcctgacggaaaaggaagtcctccatcaaaatctgcataccaagtgacgagcgtaaaaaatagcaggacaggaatgagaaaccataaacttttgagaaaccctctaaaagtaaacacattccctctttcttccggttcaatctcaactgtcttttttgtacgaaagccgtcaataaaggcaagtaggaaaatgacaggctgtataaataaaacaatgagtgtccaagccaaataaggatcttgccaatatgtaacatagcttaggagtattaacagcattagaaggaaccatagctgccctttgacaaatgtttttagactcttgcggaaggaaaacatttagtacgctcctggcttaagaaaactaatttttttgggaggacattcataaatacctttttagattcacactagataataatagtgtcaacttaaaagtctgccacgattaaagcactgttacgaaggaaggagaagtctttcacttaaggaaaacctttaaaaacagacggattccctcttccttcccctccaacctattaccaaccaaacaacgatccaatagatatataagcaaagatataccatatacacagaagaagtgtaatcggcctttgaatgtaaaaagggaaacgggacaatagattttgtatctccgcatttaatccagagaaataaatagctatatagcgaaaaccctcgctccacgcagtgtttgctttgtcatacgcattcgctatataaaactgaaccacgtaacttggcacaaacaacgataaaaaattaaaaaacccatttaccagcaaaaaacctaatattaatgcagaaggaaagggcacaacagcctctcggtcaagatgccccatcgttaatgtcataaatattaaaacaggagcgagcaaccagaaacttttgagaaacccttttaatgaaaacacactccctctttcttcgggttcaacttcaactgccttttttgtacgaaaaccatcaacaaatgccagcaagaaaatgcccggctggattaacattagaattaaaacccaagatgctagtggatcacgccaatgcgaaacattggtcagcaaaatgaatgtcataataaggaaacaaaactgccctttcgccaatgtttttagacttttttttagtgaaaacattacaatctcctattgtctgtctggattaaactacttaaaccagctggtaacaaattttttggcactattaacggtatcgccaatattgtctgccacctttgaggccgtctcctttattttatcaacacccttatctatttgttttcctaccttctctcccaaatccttcactttctcatccaaagcgatcgatccaatgattccaactgtcgctcctactgccccgccaatgactgtgcctggtcctggcaggatcatggaaccgattgccgctcctccagcggttagtccagctacaccagcatccattgcgaacccagctgctactctgccagttttttctgcggcacttttctctttattttcatccttaaatgcttccattatgttgcttccggctgacacaatcgtacctacataaggcacgcgcttaaacgtattgacaaatgtctttttagcttctttggctgttgcttttaagtcaggtttagcgacatattgtttcgcttttgcgtcatcgatagctacgccggaggcattttttcgaaataacttagtaaatgctacagaggaatggctcggatctacattgactagttttctcaaaatgttggtcggttggttattgagcctgccaagttcccggaacaacttaatcggtgaatttttattgccgaatttgcgcatgattgagtttaggcccgctgctaactttgaattgtagacgccgtttttctttacccagtcttgatggtttttaacgcggaaaatgccgtttccagctttttcaaactttaatcttcccgagacaataacggcaagagcgccaatgcctttggcaacatccattcctttatagaaggtgcctgctgtactgaaccaatcggcgattattcccatcagtgttgggtcttcaatggaagcaagctccattgcttctgaccacatattgtaatagacgtcgttttctttaaaataacggtcaatttcttcttgtacagccggggaagcaattggccctcccgttgtccagttaatgaccttttcagttgactgcatcaattctgttaacgtcgcttcagcttcgttggcgagattgatgttttctgcatctagttcttcgagacgatcggctgtgtcttgggcatgttgttttaacatgtcagcccatgattgcacgccatccattgtgaatgtgccggtgtggactaagtcttggatcgaggcgcacgcactgttaattgcctctgtgctcgcttcggcattttgtttgatgcggttgatgccatttgggattgtttctgttagaaaatcttggcgaagcaacgcgttgcttgcttcgaagtttaatagattgtttttcattttcccgagttgctcgatgtactgctcgagataggtaacgaaaaagcgcagcgccggcaagtgcagctgtgaaaaatggtttttaatcgcttctcccccttctccttggagtgaatggagattatggattttgcgaatgcttgattccaccgcttctagctgggcaatgtcttcttttttcgcatcaactaacttatcaatgccattgattacttcctggacatctaatactttcatctctttggctccccttacccttggtttgccaaggccctgtccgtctcaccgtacactttaataaggcgctggctttcctgttccattttgttgagtgcttccatatacgcttgtatttgcgctttataactgtcctctatttgattgactttctcaagaaattcgagtaacgatgtcgccatttcgatattcgcgtttgttggcgtaaatccattggcggcattggcgacattttcgaatacttcgagtgcttcggcttcgttcactttaatttctgccatcgttttccttcacctcattgtttttgcaagcgcttgaacatcgatacttgtgcttgttttgcatcaattaatcggtagctgttttcaatactgctttgcaagtcgcttatttttgtttcaattgatgaaatgatttcctcaagatggtcttgggagtgttgataagacgtttccaaataaaatcgtttgccgtcatggtcgttggcctcatttccacgccaagcgtcatagcttaattctggatcttggagatacgtcttgtcttggtggagaatgttctgctcttctattaatgtgctctttgcttcctgcagccgcttcacatcttgctgggcagttacaatatctccccgaagcgaacccatttcctgctgaagtcgttgaatgctcattgaataatccattcgtatacgtcaccttctaccatttccatatataactagcataaaagactgtggcaggatgttcaatataccaatagccctaaccacgcctaacaaaaacaaaaatttgaatgaaaaagattcttattacctagttctttcgttcaaatcaaccattttacataaaatggaggcttcctagcgccaaaacgtttatgccgctcccctcttctactagcttgtttattcctggtaaactactactaataccgttttaatagactgggggaatcaacgtgaacgaatttccacaatcgattcaatttcgttatcaatggcgtacataccaaaaaaagatcttagcggacatggctgcccttctccaaaacaaacgcgtccatctcgttgcgccgccaggctctggcaaaactgttttagggcttgaactaatggtgcgcttaaacaagccaacgtttatattggctccgacagtggcgattcgcaaccaatgggcggagcgatttctagaactgttctggcaaggcgataaaacgccggattggattagtacagacatccgccaacctgcttttgtgacgattgccacttatcaagggttgcacagcctttgcagctttgaagatagtggaggctttgagggagatgacgtagacattgcgactgaacatcaaacggaatcactagggggaaaagagaggaaggaggcatacaagcgattgctagatatggactttcaaacgttgattgtcgatgaagcccatcatttgcgtgccgcttggtggaaaagcacgatcgattttcggcgttcccttaacaagccaacgattgtcgcacttactgccactccaccttacgacgtttcccaaaaagaatggaaaaactatattgatctgtgcgggccgattgatgcagaaattcacgtcgccgaattggttaaagaaggcgacctctgccctcatcaagattatatttatgcgacaacgccaacggtgaaagaagccgagccgctccttgcgtttcacaacgaagttacgtcatttatgcagcagcttaaaaccgataaagcgtttatttcgtttgtagaacagcaccgctacatcactgatccagcaaatcaagcccaagaaatgctcgccaatcaggcttacttttcaagtttgcttatttttttgcatgcatgtagtagcgaagcgtggaaacagccggcaaaattggctggcctttatgaaaaaaacatcccaccttttgaagaggagtgggcggaagagcttttagaccatctgctgtttaaagatgccgaaatggatgaaaagcagtcgccattaaaggacattagacaacatctacagcgaattggcgctatcgagcgtagaaaagtcacgcttcgttctacgaaaacgtttgaccgttctcttgtcaatagtctatcgaagcttgatgcaatgacagacattgtttcttttgaagcaagcaagttagaagacaagcttcgccttgtcattctcgctgactacatccgtcttattgatttgcccaaacaccgaggtgatgagcaaccattaacacgattaggggtcatccctatttttgagcagctgcgccggcacatcgattcgaaagttaagctagcggtcctgactggctcgacggttattatccccacttcagctaagaaacgagccgaaaaagaggctgaaaaagtaggattggagctcaagctgaaaccgttggcccatgatccgaattacttactgcttaccgttgatgacaacacacgcgccaacatggttagcattatcaccgctgtttttacaactggcggcattcacgtcctaatcggcacaacggcgctgctaggagagggctgggacgcacctagcatcaatacgcttattatggcatcctatgtcggctcattcatgttgtctaatcaaatgcgcggccgggcgctgcgaattgaacgagataatccaaataaaaccgccaatatttggcacatggtttgcatagacacggaacagtatgatggtggccatgattgcctctcgctccaacgccgctttaagtcgcttatcggccttggcacagaggacaatatcatcgagtcaggcatcaaccgccttgctttccctaaaccacgttatcgccgccgtttattgaaagagtcaaatgaaaagacgtttgcccaggcagcaaatcggcaactacttgccgaccgttggaaaaaagcggttgcgatggagggaaggccgactgaagaaataagcgccgatgctcgttctatccctcgaccactttggtttggaacaacattaaaggcgatgattgtgattggctttcttactttatggcagggcgtaactgtagagcgtccttctagttatggtagcaaaacagagatgaccttttaccttgtttacccaattgtcgttagcgccctttttgcggccccatttttttggaaagcgattcggatttggtggcgcaattcgacgattgaaaaaagcatggagagtgttggggaagccctttacaaagcactacatcaagcgggcattgtcgagactccatgggagaaagatgcgatctcgactataaaagcagggcatggcaccctcgaatgctggcttaaaatcgggacaacgtatgagaaaaccgtttttctaaaagcgctccaagaagtgatcgatccgattgaagatcctcgttaccttctataccggcaatcaaaggcccatttccgcacgcgcaaagactattttgccgttcctaccgaactagggcgtaagaaagctactgctgaaatgttccaccgtgaatggaaaaaacatcttggcaaagcagaacttgtctacacccgcagttttgaaggcaggcaaatcctattgcaaggacgagtaaaagcgatgtcggctgtatttgtacctcgctctgaacgaattagcgcttggcggtaaacaaactaatcccgtgccacatagagcagtacgggatcttgggtagaacggcaataagcacgtttattgaccagttacatatcggtcgattacatctaatacactacgaagctcatcaatcggcatttgtccgggagcggagctttcattggcaatcgcaaacgtaagtgctgaaccacaagcgccgcctgccattcttgataatgttccaagacgacccatagccatggtaatgactggaattgtcagtgtggaggcggctttttgcgttgcctgcatcaaagtgagcacgtcggccattgtctcgggcatcactgcgaccttgcctacatcggcaccattcgcttccgcttcttgcagttttgccaatatatccgcctcagacggcgtccgctgaaaatcatggtaggacagaatccattgcgtttccgtttccttagcaatcgctctcaggcgctccttttcggcttctgggcagctaagctctacgtcaactacgtcgacaagtcctagcttcattacttgctcatagagcgcagtcacttcctgctcgctgacagtgatcggttcgcccccttctcggatcgatctgcgcgtaaacaaaatcgggatccctttgctatgcgcctttaaaagggaagccgtctcaaggacatcctcggttttgccaatatgtttataaaaatcgactctccactctagaagatccggcttttttgcagcgacagcgtcgatttcttctatcagcgctgcttttgtttttccgactagcggcgcacaaatcaatggcctttgtggcgtagacccatctgttttttgaatcggtttgcccatgcaaacacccctttatcccatttggtcaatcggcaagcggcttttccagttcacaatgcctttatttttgcgctttaaagcagcactgtcaacctttttcttatttcttttatggcgccaaacaggaaaatgctgtgcttgcaacgaactcacctgtagctccaaacagaaaggcgctgatgatgttgagtgacatgcttgtcccgttatatagcctgcctgaggaaccatccgtttcaaaggaaatcactattagacgcgcacttgccccagagaaaacgattgtgcttaactgggtcaaatcccattttagccaaggctgggctgatgaatgcgacgttgcttttagccgcgctcctgtttcttgctacctcgctgtaagtggtgaggagcttctcggctttgcctgctatgatgcaacgcttaaaaatttttttgggcctactggcgtgaaagaggacgcccgtggccaaggaatcggaaaagcgctattgctccgctctttccatgccatgcgcgaatcaggatacggctatggcatcatcggtggcgctggtccagtagatttttacgaaaaagcgctaggcgcgatcgccattccaaactcaaagccagggatttacaaaggcatgcttcgccagaattgagaaggcttcccgaagcgccttcacgactgatagcagcaggaaagcgcaatgaaaatgagaatagtcacgtcgctgttgcgacaggaaaaaaccgccctccgatccaaaggcggttttttcctgttggcacaccatcgcaccctcgttttgcctatagctctggcaagtcgatttctttcagtctcaagtttgcaagcctgtaacaatagctttagcgactgtgactgtccgttttgcttgctgtttgacagcctgttcgacgtcttctatttgatttccgtcttggtcaattgtcacgctcgtgccgtaaggattgccgcctgaagtgaaagcactttggtccgtataaccaggcgcaacaacaattgcaccccaatggtacatcgttgtatacacagacaaaattgtcgcttcttggccgccgtgtggattagaggcagaggacatggcgcttactaccttgttagcgagtttgccttgtgcccacaagccgccgagcgtatcaaaaaattgtttagcttgtgctggaagaacgccaaaacgtgaaggcacgctaaagatataggaatcggcccattccatgtcatctggtgttacttctggcacgtctttcgtcgcttccacatgggcacgccaggctggattggagtcaattgctgcatctggagcaagttctggaaactttaataaccgcacttccgcgccttctttttcagctgactcttttgcccattttgccaattggtagtttgttccggtggaactataatagatgaccgctgttttcacatttgccattttcaaacctccttttcactttattatatgtatacccatttatctcgaatttaatatatcttttttcgtcctatgctaaaataataacaaacgagtaggaaaggcagacgtttatgtacaacaaggctattgtttcctggatagcggcgattttatggatggctacgatttttcttctctcccaccagccagcaaacgactcttcaaaactaagtttgggtgtacttgactttttcatgcagtcgctatcggcgatggtgccacaggtagagatgcatgccgatcttctccacactgttgtccgcaaaggtgcccattttggcgcttactttattcttggtatcctcatgttgaatggacttcgccaaattggcggcaaaggggtgaaggcggcggtcttggcgctctgcttatgctttttgtatgcgatcaccgacgaaatccaccaactgtttattccaggacgcagcggccaatttaccgatgtgcttattgacaccgctggggcggcaacaggcataggcatattctcgctcgtcctccacctttttaggaaaaaaacgtgaaatagagcgagctgcaataagctcgctctatttaagaaaaacttaacacttccgcaatggatcgtatggagctaaatcaataggtggctcctcgcctactgccaaagcggctgctaacgtccctacataaggccccattgtcaaacctgatgcgccaagcccagttgcgatcactagcccttttaatgcttttactctgcctagaagaggctttaagtctttgcttgctgggcgaaaaccgattcggacttcgcgtagcgaaccttcacttagtccaggggcaacacggagcccttcatcaagtacttcatagacgccccctgccgttaggcggtaatcaaaccctgatcctgtttctctcgttgccccaatgacgacccgggcatcatcaaaacagactagataatggctcgtttgtggaaggacgactggccatttcgacgtatcatacccttccatgccaatgtgggcaatttgtcctttttgcggctcaacttctatcgttattccaatagactcggccaattgtttcgcccatgcccctgatgcggcaatgaccgtgtcgccttcatatacggtcccctctacttcaacgccgcaaatggcttcttcctcgtatacaagacacgcttcaccctcaactacttgtgcgccatgctttttagcggcacggcacaaagcgtcgcgtaacaaccgaccgtcaaggcgggcagctccttcgacataaacagcttctagcccttcctttagcggtgggaataacgccttcgcctccctatacgataaccgtttaatttcgcctacttctggggtatcttgtttcctttgatgggcgcgggcttccattgcggcgagctcgctttcctcttcattgacacctagtgctccgacgaaagcaaagccaacatgctcctccccatcttgtttcagtctttccatcagctctgggtagtaaagcgctccgttacgagcaagcctgtaccaatctggatcatctgttttcgagatccacggacaaacaatgcccgcgcctgcggctgttgcttcccctttaaaacgtttatcgaccaaaataacgtcttccccttttcgggctagatgataggccgcgcttgccccaactatcccggctccaactacaattgttgtcatttgcctcccccttgctcctatcgctttttaattagtctatcatttcagtttcagcgatgtaagctaaagtagaaaacaaatatagattttgctatgaagtcacttgccaatcgccgatcaagcggatgacgataggaggaataacgagcagcactacaatggcgccataaacaccgattgtatagctagttggataatcaaggccaaatcctcggttcaccatggcagtaattaaatgaagaaccatgttcgtaaaacaaaaggcgtaactgcggatcatccaattgcgatgttgggtcattcgtttctttttgatctgaacgagcgcgattattgtgataagcggccaaatgatgttgattgcattgaaaccaatgctgacgattttgcctcctgttgcgtatggagccatgtagcctgacgtgaggacgacaataaagacagatacgaaataaaggtagccgtttaagcggtggaacttgcgacttttggcaaagattcgttttgaaaagttaagcagtcccgccgccatcgcaacacaggcaaacgccacatgaatgtacattacgtttagccagaccggcacatttaactctcgcgtgagcccggttttatggcttaaaaatgtttctgctcctgggtcaatgacataattgtatacgaacgcgtaaacgataaaaacaatactgatgcagacgagtagcctaaagaacattttctgcttattcatgtataataaaaccccattttcgtcataaaatccgcttcccgatcaatttcgacgcaggcaacacaccagccttagcagttcctatcatcttgtctccgtctacactgacttcaaatttcaaatttaaacgcaaaggttttgtaatgggcagcgaccaagtcagcttattgccttgaatgacgggatggatgaattggaccgtttcctctccttgtgtggctttgccacggatcgtctccttgtctgtcgagatcgatagtgcaacatccagttttccaattggcgtcatgatttctgtggcccattcgccctcgaagatagacgctattctagattggttaagcatggcgctatctgtatgtccaactttattcgttgtactgttttcatcgtcctctgccttcgctgtaccatgacgtgggacaagtcctacgtctcgccaaaccgttcccctccgttcaaattcaaatagctgttcaacagcatgggcgatgcgagggccaagttctcgttcaacaagatagagggcaagatccagtcccgatgtgacaccgccgctgcttacaaaattgccatcatcaacgacacgtgcttggacagtggtcacgccagtagcagcaagtgcatccatgcctagatgatgtgtaaccccatgtctgccttccagcaagccacccatcgctaacaacagggagccgccgcacaccccagcgatgaccatgtctttctggtggagggcatgctcgaccattctggttaattctgtattcatcgcccggcctaatatcgccgggattgaatcaggcccctccccatcgacagccccggctgcgccagggacgagaatgattcctggacgtgtcgggtctagtttttcctttgcttcgagtaggacgtcgttgacgccgctcttcacagatcttggtccttcagcagtcacaaattcgacgctgaaattgtctttgacattcattgaagctgcgtgaaaaacttcatagggggcaattgcatccaaaaggtcgaatccatcaaatagaacaatttgtatcgataccatcttcgtttctcctccacatccatttagttaacaaactgagctccttgcattggaaaacgagtggaactgcttcgatacaaatcataacaacgaacactctcaaataacgtgagaaaaaaatcacaaaacgatcaacaatcgatcacaaaacaggcgtctgcattggttttgaccggaaaaatgataaactaaagggcaaaggtgggaagtttatgaatgcaaagaccatactcgttgtcgacgatgaccaaagtattgccgatttgttaagggattttttagaaaacgatcatttttacgtgttaaccgcctccaatacagaagaagcatgggaggcgttccagcaaagcgctgtcgattgtctaatcctggatatcatgatgcctggagaaaatggatttgcgttctgccgtcgaattcgcgcaaaaagtgacgttccgatcttgttcttgagtgcacggagcgctgatgttgacaaaattcgcggcctgaccctcggaggcgacgattatattgtaaaaacggcttcgcctggagaaattgttgccagagtgaaagcagtcctacgacgctctgcttcaaatcagccaccgactgaaacgatcttggaatttggccaccttacgttaaatctgacaacacgagaacttgctgtggacggaaaaaacgtgatgctgactccaaaggaatatgaactgctgcaattatttttagaacaccccaggcatgttttttcctatgaccaacttctcgataagctgtgggatggcgtaggcgacaagcacaccgttcgcgttcatcttagccgtcttcgcgagaaaatagaagcggacccgaatgaccctcaatatattgtaaacgtatggggaattgggtatcgcttcgaaggaggataacatgcctacactgcgtatccgtacatttacagtactctgttttttcttcattctatcattaccgtggattttttatgtgacagcacacttcatggaaacaaaaacgtttcgcttctctacacctgatgaaaacttgcaaaggcatgtaaccgagaccattcatacgatcgaaacgaatgcagacaactggacagacgccaattggcaacgccaactagaaacccaactgcggaatgccaatttggaagttgcgattttgtcggcggcgtctaatcaggaaatgtatcgctcgaatccagaaagcagcagttggttttcgtcaacagaacgattctccctcatcgaggacggccagttacttggcaaagtggtcatttacgtgccaagctcacgaatggtcccgacgatttcagcaatcgttggctttttgctcgcatttatcattgttggcatcgccttgcgcaggttctttcttcaaccactcgaaagaatgggtttggtcgctcgaaaaatagccgccggagagtttgatggacaattgccaataggcaggataacagaaattgccgatgtaagcgctggatttgaagtgatgatgaaaggactgcggacatcccagcataaacaaatggcactggaagaagaacggcgcttcatgattgcagcgattgcccacgatttgcgaacgccgctgttcgccttacggggatatttagatgggctagaacaaggcattgcaaagtctccagacaaaataacaaagtatgtggcggtttgtaaggaaaagtcaaggcaattggaccggctagtagaggatttgtttacctttacaacgatggagtatatggagcagcaaaagaatgtacgtccaattgatttaaaagatctttttcaacagacgattgacggcttccgcccactcgcccaacaaaaactcatctcgatctcaacagattttgaagagaactgcatgattcgcggcgacagccacttgctagaacgtgctttgaacaaccttttcgataatgccattcgccatacaccctcatcgggcaatatcgttgtccgttgttataaggaagacgctaacgtgacgttttctttaaaagatacagggccaggcttctcctctgaagaattagagcgtgtgtttgaacctctatttcgtggcgaagtgtcaagaaaccgttccacaggaggaagtgggctaggattaacgatttctcaacgaattataaagcaacacgggggcgaactagctgccaagaaccacttagatggcggggcgctcataaatggttggctgcctggagacaattaatgcgaaacaaggaacgcttgcgtttgccaaagcgttcctaaaagttgttgtgttgtcgccatttcgttacaactagggccatttctgttcatatgttcgctctgctgttttcttgcaacaataaagaggcgcgtgcactccggcgcgttgctttgtaccactgaaaacaaaaaacaactagaagcaacaagtcgattgcatccccgccataatacatgagcatcgcccctgtctgtgcttgttcaggagcaatacctacgggcggattggcataaatccatttcgataaaatgccgtgtccagcgagcgcgatgactagcacaatcgccctgtacaaaaaaggtttgcgatgtgacacagggtcaatgtagatcatggaaatcgtgaacatatagcctgccaaaaaaacgtgaatgtggatcagaaagtaaagaaatggatgggcatgcatgaatgcaaacaagcttgttgtataaagaagccataaagcaccaatgtttaataacgatgctacactaggatcggcaatcacttgtggtatcttgctgcgtaataactggctaacgccttttgccattggcacaggcaatgtccgcaccaacagcgtcaccggcgctgctaatgccatcaacagaggcgcaagcattcctaacagcaagtgtccgatcatatggaaggcaaaatcagtatgtgccttttccgctattggccccgccaccgctagataggcggcgaaacagccagcgatccaaatgagcgtccggtaaaggggccatggctttcgagtcctataggataataaagcagcaacgatatagagaatgaaagcaccgacaaacggcaatgtgagtaacaattgggcaaaaaaccattctaactcgtttgccatagctgggtggttcatggctgccgcctttggcctgttctgtatacaagaacggcaccgcagatcactaaaagaatggcaatcgcattccagacactatcatagatatacacattttccacgtagcgaatttgatgaatccgcatccacttatgttgaatcgtgccatcatacaattggaaagcccctgagccaagtagaattccgccaagccaccttttgccccaccaaccgcggcgggatttcaggtcggccagcaagaacatccccgaaacgctcgcaaaccagccaaatgcatgaaagataccatccgaaatgatccctatcgttctagtcgacttgtcgtaaaaatgatgccattgcaataattgatggaacaagacttcatctaaaaaagcagcgatgccgacgccaactaacacgccggaccaaagattgcgttttaagtacaagtgctgcagttcctgcttcatcggctttggcattctcataacctccttgttcgttcgctattactagtctatccatctagcaattaaatcaaacacatggtataaggcagccaaagcggcaaacgcaatagccagaaaataattctttttgttataatgtagtgaatgattactcattcataaaagaggtggagcaaagatgcgtatgaagaaatcgatggagcaacattccgtaaatggcgtgtccatggcgaacgggaccgtttcatttcgttcggtcactttaaatgtatatagcttcgctatcgatgggataatcattgacgctggtgcttccgcattaaaaaaaggctttctccctttctggaaacaacagccaattgatgctctatattgcacccatctccatgaagaccatacaggctgtgccacttggtttgaacaacaactgcatgttccgatttacttgcacgactcttctcttgctgctgctaagaagactggcgactaccccctttatcgaaaactattttggggcaagcgcaaaccgtttcacccagctgcaattccagtaacattccaaacgaggcactcgaactgggtcagtatttttacgcctggacacgccactgaccacgttgccttcctaaacaaatcgactgggcaactgtttacaggcgacctctatgtacaaacaaaaacaaaacttattatggacagtgagtctgttccacaaattattgcctcgctccataaattgctgcagtatgattttgaagacgttttttgcagtcatgctggctatttaaaggagggccgcaaaaagctagtacaaaaacgagactatttagaagcattaagcaaccaagtccatgatctttacaaaagcggactccccattaaggaaatccaaaagcgccttttccctcggacataccccattacccgattttcaaaaggcgaatgggactccgctcacttgatcaagtctgccttagagtataccgtaagcaatcaatagtagaaaaaagcaagcagcctctgcgaaggaagctgcttgtctatgacttgtccgcttttttaagcggcttagccaatacactgccgctttcgacgatcaaccaagtaataactatcaaatttcagcaatgctgtttttagcagcttaccactctgcaacgctgttgtcttgatgcctccagatagggtttcgccaattgtgacctgtttcgctcatcttgcggacgtggtcctcattgatttcaatgccaagcccaggtttgttcggtatgtccacatacccatctttatagtggaaaacgctgccgtcgacgagataatcgagaagatcagacccttcattgtaatggatgccaaggctttgttcttggataaacgcattgtggcaagttgcatccacttgcaaacatgccgcgagggcaatggggccaagtgggcaatggggagcggccgccacatcaaatgcctcagccattgatagaattttcttgcattcagtaatgccgccagcatgggacaaatctggctggataatatcgacatagccgtcaacgagcacttttttgaaatcccattttgagaacatccgctctcctgttgcgattgggatagctgtgtttctggcaatttcccgtaacgcttcattgttttctggcaacacaggctcctcaataaacatcggcttaaatggttctaactctttggcgagtattttggccattggtttgtggacgcgcccatgaaaatcgacgcctatcccgacatgcgggccaacagcttcgcgaatcgcagccacattagaaaggacgcggtcaattttttcaaaggaatcaatatattgcatttcatcggttgcattcattttcactgcagtaaagcctttgtcaactacttgtttcgctgcagcgccaacttcattaggacgatctccgccaatccacgagtatactcttatcttttcccgtgctttgccgccaagcaactggtggacaggtacgttgtgatacttccctaaaatatcccacaatgcttggtcaataccggaaatggcgctcatcaaaattggccccccacgataaaagccgccgcggtacaggacattccaatggtcttcaatatgaaaaggatctttgccaatcaagtattccatcagctcatggacagcagcctctacagtagcagcacgcccctcgactacaggttctccccacccagtcattccttcgtccgtctctattttcaaaaacagccaccgtggctggactttgaacagttcatagcttttaattttcatttgttgttctcccctctttctgttatttcattgtttgctctagtgccgctacatagtttttcgcttttgccgtaagctcacgcagaaaggcaggcgtcacttcggccttgccatctactaaagaactgccaatgccaaatccgacagcacctgcttgtttaaaagcggcaatgttctggtcattgactccgcctgttggcaaaagcgggatatgggacaatggcccgcgaatgtctttaatgtagcctggaccgcttgccggaaagactttgacaatatcggccccaagctcgtaagcgcttaaaatttctgtcggcgtataggcaccagggatgctgactttgccatagcgtttcgtcatttcaatcgttgccgcttttacagtcggggaaaggataaaatcggcccccgcttgaatcgacaaaaacgccgcttctggatctaacaccgttccagcgccaatcttcatttcgcggcccagttcccttgataacaaccgaatcgattcgaatgcgtcaggggaattgagggtcatttcaactaagcgaatgcctccctctttaagagcgcttccaattttcacagcgtcctttggcggtacgccacggataatcgcaatcagttggtgctgataaatggcttgtaacgtttccatattttcctcctaacgattcacgtcttctcgattttgttggaaagcatgcaatgtttgccgagaaggcaagccttcaatgtcgccgtgcacttgggtcacaaaagcgcctatcgcacaaccgcgtccgactgcctctttaatggcgagcccatcgagcaaaccagacaaaacgcctgcggcaaatccgtcgccagcaccaattgggtcaaccacttcctttactgggattggagcaacatagccagactggtctgtgctcttgtaataagcacctttctcaccgagcttgacaacggttagctgggcgccaagctgtaaacagcgatcggcaatttcctcgctattgttcgtgccgaataaatagtggccttctccataccctggcaaaacaatatcagccgtgccaatcaaacgctctaacaaatgcttctgtttctcttccgtcagcaattttttgcgtatattcgggtcaaacacgattttgacatgatgcttcttggccatttctattaatacgaatgttgtctgctcgcatgatttgctcaataatggcgtaattcctgttaaataaagaaacttcgcgttcttaacatagtcctcattaatatcggcaggctctagacggctcgccgcagaaccctttcggtagtagaggatattcgccgtcttcacagtcgtttgttctttcaaaaatagccccgttggagcctgctcatccatggctacatacgttgtatcaacaccttcgccacggacagattggatgattttcgctcctaactcgtcagcgccgactcgactaatccagcctgttttatgaccaagtttcgctaatccgatcagcgtgttcgtctctgcgccggccacacgggctgaaaaattagaagcgtatcgaagctgaccatcctccttagaggcaaacaacaccattgtttcgcctatgcttactacatccattcaaacacctcttcatgtactggcttcctctacaaaacgtatccaagcttttgtgaaatgccgtttgctgtgtcgataacgttgttcacgatttgacttttttgtctcaacatccgctcttttggccctgctacgctaatcgccgcctgcattccttttgatgcatcaaatatgggcgccgccacacagtacagcccttcttcattttcttcatcatcagtcgcgtaacctagctgtgcatattcttgtaaacgagcaagcagtgtgtctttatcggtaattgtgtgtggggtgatccgcttaagagatacatgttttaagtaatcgatacgttgctcctccggcatgaatgtcaaaaaagccttcccaagtcccgtgcaataaaggggctttcgtccgcctaaatacgctgacgtccgaatcgagcgattgctatcgattttcgccacatatacaagttcctggttggctagtagcgccataaacacagtctcctctactgctaaagctaaccgttgcaacgattccgtgcttaacgaagcaagatcaagtgattcacgagcagcattgccaatcggaatcagttttggaccaagagcaaattttttcgcttggtttacagaaagataattttcacgataaagcgtatggactaaagcagacgtgctactttgcggcaactcaagggtttcgctaatttctttaatactgaggccattgacatggctggttaacaattcaaaaatacgcagaaccctttccgctgatttaacggacaatcatactcgcctcctaaaatcacatatgtgattttcaatcattaatgtgatttgaaaacactctaacatagcgatttgcgttattgcaacaaaatttttaaagcgctttcaaaatgtttgctagtttgctcgtttcggtgattccccattcgccctacttgtattttcataaacggcagcccaaaactccatgctaggaacaaaccttttttcacctgatatcacgacataaattagggtatgatggccgccgttccaccttttccgactgtccatacactaaagaaaaggagggaggccatgtatgtatatgttgcaattggggattcgcttgtaacaggggttggctcaaccaacggatttgtcgtaccttatcggaacatggctagccgccgattaggacagccgatccaactcattaaactggctagaaacgggctaacctgtgagcagatctccagtttgacttttaggcattctaaacaaatcgagcgcgccaatatcataacgattacagctggagggaacaattttttaaccgccttacggcaaacgagtagaacaggcactgtcgatcatctccctaaaacaacagctggcgtttatgcctgtttacatcaccttatccgtcacatcacttacgtaaaacaacatgctcgaacaccatacatcgtccgtgtgtttaacctttataacccgttgccaaatattccagttcttcagtcgcatctgtttcgttttaatcagagcttatatacgttggaacgctatccaaatgtgcggatcgttgacattagctttctttcaaacggagttcattatctagcaaaagatgggatccacccaaataaccgaggctatgagaagatggctgaggcagtttatcagacggggttccatcctctgtagagagcccgcttgatttacatcataaaagccagctaactagacagatagctggctgttcttctatttaaatttccgttcaacacaatcctgccttacaccaccacaaatcttttccctaatgaaaacctagctcgtcgccgccttcccaccacttgccagtcttgcttttcttttgttcttttttcatcgatttgatcagtttgttgatatctactttgccagcagcatgctgttccattgccgccgctataaacagttctttgatttgcgcaaaagaaaacccttcggtttcactaacaattttgtctaaatcggctccttggacaaccgtttggaaattaagaacctttacgtaacgatggcgtagctctttattaggaagagggatttcatagcctcggtcaaatcggccagcccggttaatcaaacctggatcaatttcttctggatagttggttgtgccaattaagaaaatcccctctttcgaagtagcgccatccagcgtatttaagaaataggaacgagcttcttcaggcatagagtcgatgtcttctatgactaaaatcatcggcgcaagacgtgtcgctgactcaaacacttggctaatcgattcacttgaagtaaattcggtaatttgccaataggccacaggggcgtcaacggtgccagcaattgatttaacgagcgttgtcttgccattgccaggagggccatagagcaagatcccccgtttataaggaatgttaaacttggtaaaaaaagaccggtcttctgcgaagaaatggtccaacatctggtatatttcttcctttacatcagcccgaagcacaacctcttcccgagaaatagcccgcgttacaggttgctgttcttgaacaaacccgtccatcccttctttaaacacaagcacttcgttccgacttttatgccacagccggttccgtaacgtttgcaggaagttttccatttctagaggacttgtcgccaacacacactgcatgtacataatgcttgaatcatcaaaaaccggaatgcgagcaaaagcaatgcctgcctttttataggcatacacattattctggagtgcccgatgcacccgataaacaggttcacgcgcttcctcatcatactcgaacgtttgtgtctccagcttatcaaaaattttggctacatgctccacttctggattttcatttttaacgtcttcttcaaaaatcgtccataattcaaaatgggcgtcatccgtttgataaggctcaaatgttttgccataggcagcaaacaatgcatcttgaatgcctccaatcaacctcgcataccctggatagcctttcacgtcgtttttttggtctgcactttgctcataaatgcacttcatctgcgttactccttctccttttctcttgaagaagttcctaaaacatagccttcttccccataagtatagcgcaacttttgtcctaggagtatccgtgcttattcatcaaagttgcttcaatcatattttcaaaggggcgagatcgtcggtaatgcgtcccaccataagttcaactgctttctctcgctgcatagacagtgacaaaaaaagcgcttcctgccttttcaagacaggaagcgcgaaagtgaacatctacaagacaattgttatacagccagtcacatttttttaagcattccactcaaccattacagcgcgttctctgctcatttccttaaaggctactggccgctttttgtcctattaggaagccaaaacttacggaaaacggacaaagttgatagcggcgacgacgacacttacctggatgtttggcccgtatccagttgatgttattacaacaacaatatttgccgttgcacttaagagaatgccttctatgaggttgttatctgttgcaatttcaaccgtttggccaattcgggtcgccaactcatttgtaaacaaattttcaaacacgtatatccctcctttactgtccgcttgctgattcaatttctgctaaacgcacaagcacttgcgacccggtgtcttcaattatcacgatgtagtcagtcaggacggaaagcaatgtccctgttattacaccaaatggcgttgttaccgttaccggttgaccaactaagccaagcaacaaatctctaatggctcctgtcccatttggaggagttgttccattagtctgtttcgccaaccgaatttccaataacaagtttaacaactcgagagtgagagataattctccgtttgccataatgatttacactcctttcttgtctacaatcaataaatgcgaattttgtcatcttgtatagatacgttcctactttttaaacctattttgttaaaattccactggaatccaagttcccttcaaatggttaacttgaataccatggctcataagacagccgtctgtcatttgccccattagaaaaaatggtcggcaacataaggaggaatgaacgatgcgcgacatcttggtattttttttaaactatgagagctgggtttcattgcaacaagcactgtcttcactcagctctctcaaaccccgaatcaagacagtttacctaattcacccgccaacagctattgacaagcaacaatttcaatacgaaatacaaaccatcgctgtacccaatggaggaattgctggcgctttaaacactctcctccaaacatgcgacagtacgtatgcccttttcttgcataacggcgacaccctttgtccaaacatacagcctaaccgtttgacacttccttctggtaaagcagtaatgacatttaagcaggcaattgggacccagtatgtggaacagcctttcttagtacggacagctttcttccaggaaaagacgttcgctgatcttgatcacttgccttttccagacgcattatttccagcttggctgcaaaacgtagaaacacgccaaattgttcaaacaaaggatccctggatcaaacggccaagagccaacacatcaaaaagcgaacgcgagaaatatgcatacatgatgaaatacagacgagcaaaagcagagatcccttcgcctaccctggccatcatcatgtccgcctttaatatgacggactaccttgaaacggcgattgcctcttgttttttacaacaatcaccgcctgaccaattgctcatgatcgacgacgggtcagaagataatagctacgaaaagatgtgcaagtggaaaaaaaagcggggcgtaaaggtgttcaaacaaaaaaacggcggcaaagcccgtgctttaaatgcattgctccctcacattacaaccgactttgtgatggaggtagatgcagatgattggcttgaccccgatgccctgttcacaatcaagaaaaaattgcaacatctccctaagcatgctgccgttttatatggcaattttagaaggtggaaacaacagccaacaggcacgctcctttataaaacaatagcgaaaggaaaacctgtccgttcagcaagtgaactcatgtcctatccatttccactaggtccccgcatttatcgcacagcgatgttaaaacaaataaatgggtttcctgtcaccccttttgaaaacggacgtctgtatgaagacgtgagtgtgttaatgaaattaatcaagcaacccaattctgttttttgctatgaagattttactgtttataacattcgcgaacatcctacaagcatcacccgactcaatcgccataaatggaatgcatttttgccttacgcagatagtgattgatagacaggtatgtgtttatctaggttcatttcaatataaacaaataaaggattattcacagcagtcttgtgactaaaatgaataatcctttgtatcctaatttatttttaataggttgctcggcaaaagtgccttttcgagtattacacttttaaactcataataagcagttcgccaattgggccgcttttcctttttcctgtatcttgaaatcccgtttttccatacagttgttgggcagctatgtttttatggtttacttctaatacaaattccttgcagtgagggaattccgtggtgacaaactcctttagcaacaacatcgcctgctttgcataaccttttcaatgtttcgcttggttaatggataatgcagtgagcaacatagcctgtggattgtcagaataccgtcgaatgtctccattgtgactccacctcgacgttattatacaacaagaacaaacgtttcgcgcctcttaactgctaaggctcatctctcacactacttttcccgtcccctacataattaattgattcccgtatggccacacatcgacttgcctaattcgttctctgacggagccaaatgccgtttccgtttatttgaaacgaaatagaatgaagaagcaacaaaaagaatgatgagagaggagttagaaaccaattgtgttctcaagaaaaaccgcaacattatgaccccgtccatacgaaagttggcgttattggtttaggatatgttggccttccgcttgcactgttgtttacaaaaaaaggctaccatgtaacaggaatcgacattgatgcaaccaaagttgcctcgctacaacaagcgtcaagctatattcctgatattgaaaatagggaacttgctcaagtgttggctacaaacaagttaacgtttgctgctgattacagcggaatcgaagacttggatattatcgtcatatgtgtccctacgccgctagcaagcgataacaaacctgatttgcgctatttaaagcacgtgagtgaagacctttatcctagactgcaagaaaaacagcttgttattgttgaaagttcgacttaccctggtacgacacgtgaagtgattcaacctattttagaaaaaagcaatctcatccctggaaaaacgctgcacttggcttattcgcctgagcgaattgatccaggaaacaaatcgctttcaattgaggaagttccgaaaattataagtgggctttccgagcaatgcctcatgcgtatcacagccttttatgagcgtgtgtttaataccattgttcctgcctcctcactggaagttgccgaacttgccaagcttttagaaaacagctaccgctttattaatatttcgttcatcaatgaaatggcaatgttttgcgacaaacttggcattgatttatgggaggcaattgcaactgcaaataccaaaccatatgggtaccaggcgttttatcctggccccgggattggcgggcactgcatcccgatcgaccctttatatttatactgggttggcgcacagcgtggtttccacacccaatttttatcgttatcggagcaaatgaaccagacgataacctcttatgtcatcgaacagattaaaaagctagccgaaaccgacaaacccatttccgatgcggcaattgtgttatacgggctctcttataaaaaagattccaatgacgtcagaagctctcctgcacttgatattatgaaggcgctcatccagactggcgccaacgtcagttatcatgacccccatgttccatcagtggaagtcggccaaacgctctattcttcgcaaccactcactaaggagttgctagaaaaagccgatctcgttgccattttaaccgaccattccaacttgccaataacatcgattctggaacatgcaaaagtggtgtacgatacaaagaatgtgacaaaagggtataaaagcaaagcgaagacagtcgtgttagggggcggggtaacgcactacctagcagatggaaaaagctgatgatctcagtcattacatgcacaaacagacacgacagcatgaatacagtatttgacaattatttgcgacaaacaatgaaagacaaagagcttattgttatcttgaatcaggacaaaatggatcttagcttttggaaagagcaagcaaaaaaactgcctcgcgtttccgttttccaagtaccagagcacctgtctgtcggtgaatgcaaaaatatcgccgccgaaaaaacagcctatagccatattgcgaaatttgacgatgacgattactatgctccactctatttggagtcagcatggtctgcctttgaaaaacaaggcgaggcggatattgtgggaaaaagcagcgtttatttctatttccaaaaaagcaaatgcttaggtttttttccttctttgtatgaagatcggtttgctaaacaagtggttgactcgacattagtattcagaaaagaactattaaaagacgtttgctttcctaaaatgaaagttggttccgataaaaaattccaaaaagattgcgcagcaaaaggatttcggattttttccactgatcgctataaccacgctgtaattaggtctggaaacccgaaccatcatacttggaaaataagtgacgaacacttgctgaagggctgcatcaaccttgtttatacggatgactacaaacctttggtcacaggctagttaataaagaccgaaagttgagctttgcctcaacatattttaaagcatcggccgacggaaacagtaaaaagggtgaagtcccatcacttcaccgggcatgcagagaaaaattgtacctctatttggagcatttttgcaatgataaaaagaatgtttcccactcggctttgcaggcctttagtgtccaatgtttgacaacctcacctcgaattctctttgaaaacttctttcttttttcggggctatccattaatgccttcacggcgctttgaaatgcgtctggcgttcttggaacaataaacccatttttgttatgtgtgattagttctggggcaatccctacacgggtggaaatgagcggaacaccgcaagcagcagcttctaacagtggcagcggaatatgttcagacgtactagaacaaataaagcaatccaattgttgataaaacgccgccatctcttcccgtggcactcgatctttatatgtgcgtatgtcaagctccacatcgatgtcctttaatgccgccagtactaaatcatacccttttagctggcggtaatcttcttgatcaattctaccaacccatcccaccttaaaccgttcgttttcgttccgcttttgtaagggtttaaatagtgtttcatcaatgcctaccctcgttttcgcaatagggatatacggagttaacctgtctttaatttcttcggatgacgtattaatgccgcgaaacccttttaaaaaacggacaaaattggtttcatctgagtggttatttgtatggttatcgataatgcgaatcgatgtgattcctgttgccattttgttgtatgggatcgctgttcgcttgtgtagttttttagcaatgtttattgacattgggtaaatcagatcatagcggtttttatcgtctgccattacctttttgacatacttaagctctacttcgattccatcaaactttaaagaaaggagatctttggcacgataatcaaacgcccatcctgggttaccaggaaccaataagattttcataaaaatcaacctctcaacatcgggatcgcgattagcctaactgctttttaaagtaatcaatatgttcggcaaacaattggtcaatgcggtcgttgtattcctcatttttggtaatcgctgtatggccagcaatcttattaatccagttttctggccgtttaatcgcgattatgggaacaccctcttttgctgctttacaagcgataaaggcatccctcatgttttggtaagggaaatcgtttggtgtaagggcaaaagagtctgaatgcatgcatgatgtaccgaccccaggtatgagtacctgtgtatgttcgtttaatcccttgtacgaacggtgggaattcgtcttatttttaaatactttcttgataggggcgtttacatcaaaactggctccgtggacgcaggcaataatctcgttgttatagctcttcattaaagcaaccatccgctcaacgtaattattagggtaaatcaagtcgtcatctacacaaaaatagtagccttttatttctggaaaccctttaaatgccatttgtccacctaaattttttgtggaaaacgagagtctaattttgctttcttctttcaaaaaatcagggcaatcgtttaaaccattgacatggatatacatccggtcgcactgctttagaagctgcggtacaattgtcttcaagttttcaaaccggcttggcatagcagccatcccaaccgcaatcattgtctccctcctaatgttgcctcaacaacttcttcagtatttgcacttctttaatagggtttattcgctcaatttccttaaacaatggatcgttataatagcgcaggagcgctttttttaatactgcatatttaggaagttggtggaatttattttttgggccattgtcgacatagcttttaaaagaatcaacgccgctccgtaaaatccctaaatggaaaccgtggtgtgggcggtaatgatgatcattcatttttccaaagccaatcgtttgctcaattaaattatataaaaactcttcatttcgaattcccgtgcgaaaagcggcttcgattttttcaggggcgtctatatactcattgatcactggctccattttctcaaaatactccttgactttaaaaaaatgcagccctgtcaaccgccttgactgagggcgaacttgattgctgtaaggcagccctatgtcttggcaatgttttatatgagaatctagcagcgacggttcttctttaacaatcaggaaatcaatatcgccaatgtatgcatacgtaaaccctttaaactcagagtgaggcaataaaaatcgccttgcttttccctcactcgctttcgatattttgtctgtatagtagttttcctttatttcaaacgaactggacaagtgttgtttgattcgctcaagactatctgtttctttcttagaaaggttgtcatatgaaaatactttcacaaaatatgtgggatagcttttcaaaacgctgtaaacgaaatatgggatgtaccgcttgtaatttccaaatacataggttgttacacatagagacttactgctcataggcattctcctttgtttgattgttaggctgtatgagaaagagcacctctagccaatcgccgattgttttatcgactgtatagtaggaaaccatttgttgccttgcttctttttttagctcatttaaccagactctgtccttttttagttgattaatttttttgataaactctcctggagaaaggctgttcaatattaaagatcggcacttcgggccggccaccgttttcacatagccaacatttgttgataatacgggcaccccactagcataagcttccattgccggagcaggccccccttcatttgaagaggtaattaacagcagatccaacctgttgtaaaaagcaggcatctgttttaacggggtataagacgaccgagtggattcgataaattcgatactagggtcattagcgaatgctttcacaattcctttgtatagcgcttggtaattttttacttttcgctgttcattcccaacccacccgattactagttttcgttcatcaagcgaaggcaagtcgaactccgggcaaaactgatcggtatcaataaacggtcgtataaacgagacatgcctatgggggagacgtttctttacctcacgtgctaattttgggcttattgccccataacgagaggctttcatcatccgatgaaaaaaatcagtattggctttaaaaggatcgctccattctcggtatgacaaatggtttttggtaatgtaattatatgatcctatctgtgcagaatcgacccgtatccctagcaacaacaaagactgagcaattcctaggcctaaagctgaaataacctcataaccaaaattgattttagcgacttggccttgtcttttcacgttttcctccacttctttcaaggaacaaatgtccaaataaggatgatattgttgaatgattctcgcctttgcccctaacacccaccactcacaatcatacacgagcaagtgtttgaccacccttgcgatctcctttacttatagttaggcagactatgcattcagcctcaccgttatactgataacccatcgtatgcccaaaagctttttattatgcgttgctggcacggtgattcacgactcctgttcaattttggaaacaccggatttttatttgcataaactaagaggaatgtttacaaatacaagggggtgtccaagtggcaacttacctaattacagggggagctggctttattggctctaatattgctaaagcacttgtggcaaagggagagaaagtcaaaattttagacaattttaatacaggaaaaaaagacaacatcgctgaatttattgatgacgtggaagtcatcgacggggactttacaaacgagaaaacggtccaatctgcgttaaagcaggttgatgttgtttttcatcaaggagcgattccgtctgtgccgaaatcgattcaaaacccgattgaatcgaaccatgccaatgtctctggtacgcttcagctcttgcaaggtgcggttgaagcaagagtaagtcgatttatttatgcggcatcgtcatccgcttatggggactcggaaacattgcctaaacatgaacaattgcctggcaaccctatgtccccctatgcggtcagcaaatacacaggcgagctttattgtaaagttttctataacctttatggtttggaaaccgtttcgcttcgctactttaatgtctttggccctcgtcaagaccccaattccaaatatgcagccgttatcccaagctttataaaggcaatgctaaacgacaaaccaccgactatttttggcgacggcacacaatcacgtgactttacgtttattgacaatgtcgttgctgccaatttattagcagccaatgcccctaaactacaaggagaatcggtaaacatagggggaggagccagcattgacctcaactccctggtagatgaaatcaatgtactcttaggcaaacaaattcaggcaaattatgggtctgaacggccaggggacgtaaaacattcccttgccgatatccaccttgccgaaaagctcattgcctaccgccctaccgtttcatttcaggaaggattaagacagactgtcgagtggtttaaacaccactgactaatcgctgagcctgtcaatgagcattccaataaagctgagtcaatttaaatgctggtcacatgtaggtgtgctttactaagttccttggatactaggaatacgtttttatgtatcggcttgttaaacggatgcttgcgcaaatgtggccctaacggataacatcaaaaaacagcacccaatggaggtgctgttttgcgtggcgatttgtcgggaaaaagtactgccaccggaagcatgcgcctattttatcttttcgacttccttgcctaaatcgtaccttcctagatccatggatgtgtcattgatttttccataatagtggacatcgacaaagcggccatttttaaaaacggcctctttgcggacaccttcacgttcatagtggccttgttccatcatcgccaaaacccgttcgttagtggccagcacttccgcttcaatgcgccttaacccaatgtcgttaaagcatatatgttcaagttggcgaagaacttctggcccatatccctttccccaaaaagcaggcttaatcataatccctaatttgcacgtacgattcactccatggatatcgtggatttgcgcaatgccaactgcttcttcagccataattttaaaatgcttttgcgatttattcgtaatccaagactccaatttccctttaaggagcaagcggctttgcgggtagttatatcccaaaatagcggtttgaaataccgcttcatcattgtacatttcatcaaccaattcaatgtcttccatattcaaaggctgtagagccagtttcatcttctccactccctttagctaattctttcaagcgtagtggtcgcttcctggttaaatggatggaaccaatagcgtacgatcaacgctaatgataaaatacacagcaaggcgaacacgatacggatatgaataaactctgccgccacaccaccgattaaaccagcaacaggcaacgtcgacttgcttagcattaaaaacagtccgttgactcggccaattaaatcatcagggacaatttgcatccttaatgttttattaacgacattaaaaataatgatcggcactgtatgaaccatcatcgctaggcctagcgtcacccaccctgtgctaagcgaaataatgccaatgccgccgctgctgaccattaagcatacgaggagcatccggttcgttcgtttgaatgttttcgtaatcaatggaataaaaaacgtcagaagcacttgcgagacggcagcgatcgtataaataaggcccgtctgtgatgaatccaaagccaatgtatctcttgcaaaaaagacaagcaaggcgacaacgacggcattggaaatgttgactaacatcataatcaaaagaagcggtttaagaatttcatggttttttacgtagcttgctccttgaactagatatttccaagagctgccgccagcaatctttttaatgttttcttttttgattcggtaaaacaagacaacggcgcaaatgataaaaaacgaaatagcgtcaaaaagcaacaccgtaaaaccgccgaacatgctaatcaacatccctgccaaagcactgccaaacagcagcgaagtggagtcaaggaactgaaatgacgaattcacgttcacaattttatcttttggaaacattgacggaatgatactgtttaatacaacgctaaacaccgctcccccacaagcaataaaaaatccgcaaacaaaaatccagataatcggaatttggctaactgctgcgtttccaatgacaattgttaacaaaaagaacccttgtaaaaaagcagaaagaaacagcaacaacttatgggaaaagcgatccgccaacagccctgccaatggggagacgaacaaaaaaggaatcgtctctagaaagaacatgactcccatataaaaagaggagcccgttaattcgtaaatgatccatggcatggcaatcaaatagagcttatcgcctattttcgagacgagcgacccgaaaaaaaagagaatgaaattacggtttgctaatagcttcaactgcttcaatccttgtagtagtttttcatcaactcggtgatccaccccggttgcctaacttcaccaatcgggccaaactcgttgacatagggcttaatgtcaatgacaggggtgccatcgatcgcgtctaacgcttttacagttagcttatttccgttcatttccaacaacgcacatctagacacaccaattgcgttcggcctgcctttcgctctttgcgcaaatatgccgacgcttggccagtctgtattattgcgtggatggcggtcttggtagacaattttgttttggtccacttgatccatgtggaagacgatttccaaatgggaaaaagaatctagtccttttaaggcagaaaggggaatcttctcgtccacaacaatttcgctaatgacggagccccaatggtcatcagtcatttcagtccgcggcgaacggacgtggccaatgtattctatcgttgtcgtttgctttttgcctgtcatgtccacacctcgtctcgaatcagcaaatagcctctttcaatcttttgtacacagatgaaaatctcttcttcctgacacccttcacaataagcaatcacttgcttcatttttggcaaaagcgcttctagtttttcagatgaatggctttgtttgcaaaccattttgacaattggagcaggacaagggttcatcagccaatcttgtttataggcgtgctcaattttgttccatagtacccagcaatagtctgcggggatcgccaactcttttgtgaccgtgttggcgattttgcctagtaactcttcatttgagggacagtcaagcggcgaatgaattgtaatcactggcatcccttttccctcatttcgtcagaaggaacattgctgtccttacaggaatgtaaaaatcatcttctcgtttttcaattcccatcgtctttaaaaaatgggcaggtgcttgttccaatttagcgcggatttcacgctctgcttcccaaccagaagaagcgatttcacaccaccgtttgatgctgatgcctcctggcttttcgcttaaatcgctaaatccttctactactgttaggtcttcgtgtgtaaaaaggtcgagccattcttggtaagagtagcttttaatatgcgtttcgtcgtggagcagctccaattcatgattgaattggtcaacttgtttgtcttcatacccttccaagtcaataatcgcgattgttccaccttttttggttactcgtttcatttcttttatcgctaacgcgatatcggtaaaatggtgggctgccagccgcgttacgacaatgtcaaattgctccgagtcaaaaggcaattcctcagcgtaagcgcaaacggttttaacgctttttccttttgtagcagcaagcttttcaacattggccaacatagattcagaagggtcaacactcgtcaatgagtggggtgcaagcgccaaccccaaatggcccgatccgcatgcaacatcacaaatcgctttgtcatgcacctctcctaacagcgtctttaactggtcaatcgaaggacttgctttgtggacctcgctatttaaaaaattgtctgcgatttggttaaaccgttgggcacttttattcatgaatcgattttcctcctcctactaggcgaacaagacgggcaatcggcccttccgcctcactgttcattggattgagcgagtgtcccaatccttttaaaatcgatgtttcgactggcgctacgctgtttatacagcttctcacagtttggctgtacttcgcaggcgcgatcaaattagcgaggcttatattctcaccaaacgcaatgtaatcctcgcttccatatacaagactgatcgcttcaacttgttcggcaacagtaaccggctcatcaacatacaaaccaattaacactgctgacgaagggcttgtaacgctttgcagcttctctaaaacgaggtttgctcctaatgacatccctataaacgtaaggccacacgcagggtgtgctgttttaatccgttggtaaatcgcacttaaacgtgacgcccgatcgcgatactcttcgtctgatatgctttctctgcggttgacccggtcaggaaaatcaaaccggcagacaccgattttttcttcgaccaaacttgcttccaattggtcgtatagcttccgctctccttcagcgccttcttcatcgaattttcccatttgccccgattggacaatcaaaacgatttttttagaaccaaaagggatgttctcgtgcaatcgatatctggatggattcatttccatgtgatatcgccttacttatggcaaatttccgaagaaaattgcccaatttgcccgtggaaatagacagagatgatttcttcatgcagcgcttccccttcaagggtaggcaacaagcggtcgtcatccagtttcattaataaattactttcgagcaatgatcgaatgactcctgcataaggttcgtcattgatcaagtcgacatgaaactctttttgatagcggctcaactgaattggttggtttgacttgtaattaaaccctaatgaagtggaaatcgcttcatttcccgttagcattctgccaaaagaagacggtgattcatcgttttccatccgttccacgtagcgattaatatcgctaacattatgggtttgcaaaatagtgccttccttatcatttagccagccatatacgcctggtccgtaggcaatcatggagtcatagcgctcccatttatttttcgaaatttgtggaatattcccttcaggatacgtgttttttcgactccaccatccgcaagggctaggctcataaccatacttgaggaacaccttcaaaatctcctcgcgcatttgatatgtttgctccaatgtcggaaatagcccctcagcttccatcttttccctcacacggtcattattccataatgaaacattgccaatccccatcttttgcctatcggcattgcgcaaacggtaaatcgtaatcgtcggcacacccatatcgcagagcacttctatatcacgggcaacactgttcgctgtttggtgaggcaacccaaaaataatatcgacattgaacggtttgttagacaaaagcaacttgttaatcgcatcaatcgacatttttctgtcatgtttgcggccgaccgctttaatcacatcgtcttccaatgattgcacacccatgctaaagcggttaaatcccatttctagcgcctgttcaatttcatcgccctggtaattgtctggatttccctcgagtgatatttcacagtcattcgcgatcgtgtaatgttccctaatgtgtgcaacaatctttgccagttgatgcggtttcatcagtgaagcagtcccgccgcctaagtaaatcgattcaatctttgctttcgttacccaaggcgcttgtccaatcgtgctggttgattctttaattaaaaggtttacccaccgatcgagcacttctttttctttcccattttgaggcaaatactttttcacgtaattgcaaaaataacagatgtaggaacataaaggcacatgaaaatacaatgttgctggcttgtttgcgccatcaaagtggttatacaaatcagccaacgctgctccttcaattgtttccccgaaattggcagttacattaatgttataattattgtgagaaatttgcaattcaggatgcctcttaagcaattcgcctacattcaattccgtttgattcagagccatctgtactccccctattggtcaatttgcaattgcaatttgtaacctgctcgcttcctctcttcccagtaacggtttgcctcgagcataaagcgctgtaaatattcggttgccccacacccaagcttgtcgccagaaacattctttgccagtggcgggcaacggaactggcaccaaatgccttcttggtaaacagcacaactttggcatcctgcaaattcatcaaatgtaatgctacgaaactcgtcaaagccttgttcccatatgtctttaaaagaatgatctcgtaaattgcctgctttgtaatcctcgttactcatacaattgctgcaagggtaaacatctccagcactgttaatgtaggcaatcgtccttccacatttctcttggtttgtttctcgttcaactttctggcaaaacttaaccgtttctaaactaaacatccgcgtcgcttcaactggttcactagcaggtggtttctcaaattcgggcttgctgaaacgatccatgcatttcttataaatggcaattgatttatcaacgagttccggcggcaacaagatgtcgggatgcataagcgctcggccaattggatgggtttcgagccattgcgggcgcggatagccgttttgggcacaccattcaaaaatttcctcagcgtcatctaagttatagcgatggacagaaatcgctgtcctgaacgcatgtccatactttttcatccattcaaacttttgcctcagtttcggaaaatccattccccctcgaatcgtccgctctggatcagcggtatcaaaactaatgaaaaaagacgtatttggcgctagcgccgccagcttttcttctgtaatgagaaggccattagtgaaaacttgtgtataaaaaggctttgttctcgcgtagttgataatttccaccgcatctcgatgagcgaaaatttctcccccgcttaaaaacagttggagaatgccagcgtctgcaagttggtcaatcgtctctttgattaactcggttgacatctcatttggccttttgtacgccgagttagcgtaacaatgcttgcagcgcaagttgcataaattcgttgtttcaataaacgcaatcgcaggcgcgcttaaatgaaatttatttaaatcgactaacgggtcagggattatgtaacgatttaaagctgtgaggtcaatgcgctcacctttattaaaccggtcgaattccgccttggccgcctcttcaaaaaagtgaaccttcccagtcggcaacagcccgacaatccctccgtcgtttacttgatacggaatcattaccattaaaaccaccacccactatgttaatgggaggcgctgttgcacctcccgaaggccaattaaattaattaagttccatgtcttctaatttcacgctacctgtccctgctccaaccacagctagtgtgataccgtcttttggttgctcttggtccaagcggattcgttttaagttgctagatgatttctttttcatcgccatccctcctccctcgcggtttaaaacataataattatgtttgctcaggttattctgcttccccaacagaacccctgcttctttgcaatagattcatgttgggaaatgtttttattactatttcactaggctgaaaccctcattttagacaaatttactaatagagccatcaccagtacgtattgaaaaatatgatgattaacccaaaataaaccaatgccagtaagcagctcaaaaagaaataagtcattcgccttaaaactcggtttttcttcaaaataaattaaaagcgctttagaactaattggaaaagttaaacaatcattaagagcaaccattgtcataaacaacaacacttgtggttgaagccttttgctagcgctaaagctaacaatggcgggacaagtatgaccgctctatgtaaaggtgtgccctcatacaaatagcaatcaggaaaaagatcgtcaaggattctgaaatgtcccttacacggacgctagttgtttccacgattcgttctgccaaattttgaagaccacgatccaataaatcaatttgcatctgggatgcgcctttttgcgccccaaaaatacgggcaaccctattttttccacataagacgttatgccaattacaagcaacatctatggggatataagctagaccggtctatgccactaaggtcaatggcagcaatagatggcaaaacaacagcccccttccttgcgtcgaataccgatccagtttgatcgaaaaaacgaatgcctaacgcttgtcccatccctatgcccatcactaatgcctgaatcgccgcagccaacaaggatacgctccgccccaaaatcgagggcttttttgatcaattcccctacaccaaatgatgacgtgaacaacgggttcctcttctctctcggtacatgtttcaaccccgcagcttaagcaatttcaatcacagccgtacgtttcccaccagtgtcaaaaaaccaaatatcgctttcacctgttggtttattggtccagtcacctcagctgaatgcaatgtgccgtccgtccacgctaccatcgtttctgtaaacccttcccctccatcgactaaagggacagagatcaccttcgcctcaggcaaagcccgaataattccctccttcatgttggcagcgacatgttctgcgctgacactctctttaaagcctgatggagccaagacaatattcataagtgatcactcctaacttttataaaccaagaataaacagcaaaaaatagaaagcgctgtgaagtatatgaagagacaattataaaacggttttattttgcttaaaaaccgatatagagcaacaaaaaaagcagctaggcataatgcctagctggtcgtataagtgtggtttattataatttagtcatccatctccacttctaagacttctccgcttacagcagcaatgtcaatggttgtttcatcattcttgctggtttcgacttcgatttcatacacatactgcccatcctctttatccaattccacttccgatacggtaccatctacttcttcaagggcccgtttgatggcttcatcggtggaaagcgcatcagctggcagtttgctgccttcgtcgtcatcgtcgttatcctcgtcgtctatgcgctcacttttcctttgtttgacctcgcccgtatcagcagcaatgtcaaattcatattcttggccatctttgtggatttctacttcatagtgatcttccccgtcatcacgatctcgctccaattgcagaatatggccgcctcctgtttcacgaatggcaatctcctctgcttctttataagtgatgcctgactgattctctgccttttcattcgctaatacggcatcactgctcaaagcgtatccacccaacgcaagcccactgatcaaaacggttcccgcaagcaccaaattcattcgtttcatcatgctccactcctttgttgttgttacgtttatcataagcaacaaagattaaaacaaaggaaaggaaagattagaaaacaatgagaatctctttagaatgtgtttggtcattgaacaatgattaacctagtgtcacacaaatgtttctagccctacctttctgtctagtgtcaaccaagtcgttagtgaaaacgaactttctgcattgacggtcttttctaatcatcatcgtcacggccttcaatagcgacgctctcaatcgccccggtaaatgcattgacgacaattgttccttcttcgcggtctgtttcaatttcaatctcatagacaagcaaaccatcttcttcatctaattcactgtcgacaaccgttccattcaactcctctaaagcaatttgctttgcctcttcgatggaaatttgccccccagtttcaactggtttttctttggaacgtatgacgtcaccgttacccccgtcaatgtccacttcgattttttggctgttctcttttattacaatcactttataaacgttccttttctcatcataatcgattgactcaactatgccgttcccttcagtagcggcaattttttcagcgtctgtttgtggaattggctcctgattctctccatcattggggtggttgtcattgttcttcttatcttgttgaagctgctcaatctttccagtccctccatcaacaaaaagcacatacgtattggcgtcttcctctagtataattttatattgctcttttcccttggcgtgcgtcagttcagaggagacaatgttgccgtcatatttggtacttactgtttgcctgacttcctcttccgtcaaaagcgggtcatttgtccccattacgatcgtagtagtaccaaatacagctgctgtggtaacgacaacaatgcctattacccaataccatttccttttcatagccatcctcctcccttcccattttcccccaactttattacagctacaggaaaaagacattaaaatctgctgagaagctcagtgatttaggtgcaacggaagataaacagttgcggttgtcccttcgccctctttgcttacaagctcgatctttccatgatgggcgtccacgattcgcttagcaagcggcagtcctaaaccagttccacctgttccccttgtgcgggacttatccacgcggtaaaagcgattatacacgttgtctaattcatctttcggaatgcctatgcccctgtctgttattgcgatttgtgcttcggcttcaactgaggcaaccgtgattttgacaggcgcggcgctgtatttgatggcattgtccaataaaataaacagcagctgctttattttttgggggtcgccgtgcaattcaactttgtttgtggctgcatctacaatgattgaccgtccaaatgctctctctaaatttagcgcagattcccttgccacttccactaagtcgattttttggcaatcaattttaaactgcgactcatcttcggccaagagcaacatttgctgggccatctccttcatgcggacagattctgagtaaatggcctctaccgcttcttccaaaacctcaggcttttccttcccccaccttttcaacaatttggcataactttctacgaccgttaatggcgtttttagctcgtgggaagcgtcggagacaaattgttcttgttttttataattggtttcaagcaaatccatcattcgattaaacgtttgcgccattttggtcagttcgtcatttgacttcttttcaaacgcgatacgtttaaatgtgccacgtttttggatttcctccattgtctggatcatggcagcaatcggattaacaatcaaattgcttaagacgcgcccgcctataaaagaaggaattacaatcattaaggtggcgatcgccaaaatgacttgcagcactctgagcgtattctccatagtcccctgtttttccgttagttcaagggacactacttctccattctcccaaatgactggatgagctgctacagtatacaattccccctctatgcggcgcatttcgctctgttccccttcacggtaaaccgtaggtagctctgtcatctctcgacttctcgctacgtcaagcaaactttttccatcttccgatatgatccgaatcatcgaatcggcaggcaaataagctcttagaaagcgagacatatccatactggcatcagcggtgtgcaatgcctcggccatattatccatttgtgtttcagcacgctcaactgcttcattctctattgttttttggaaaacgacataaatcgtcccatttgccgccaacactaataaaagcagccaaatagtggagaacaaggtaatccggtttttaatattcatcgctcattccttcatcgtatagccaactccccggaccgtatggatgtatggcttagaaaagtgtgtgtcaacttttttgcgtaaatagcgtatataaacatcgacaacgttcgtttctccgtaataatcgtatccccaaacgtgctcgatgatctgttcgcggctcagtacttggcttttatgagaaacaagaaaaacgagcaagtcaaactcccttggcgtcaattctatcggcttagattctcttgtgacttcccttgtttgcacatcgattgccaaatcgcctaattcgtaccgctcctctttttgcgaagccttgtaagccactgacatgcgcaaacaggcacgaatcctcgcaagcagctcttcaatttcaaaaggttttgtaatataatcatttgcccctaaatcgaggccgctaactttatcaggcaatgaatcgcgtgctgttagtaaaatcactggcgtcttacttatgctacggatgcgcctcaacacttccattccgcttaattcaggaagcatgacatcgaggagcaccaagtcccattgccctcttttaaaagcttctaacccagaaaatcctgtcgatgctgcttctgtttcatacccttcatgttcaagttctaactgtattagtcgggcaatctttctttcatcctcaataatcaagattgattctccgctcattcgctcctccgtttcttcctgttccatccctcttttctgataggatactcgaaccagccagtttttataaaatcatagcacaggaggggacaatacaaaaggcaagccaaattaggcgttttgcccttattatgcctgtcctttctcaccacattgcgctgaccttttcgcgcttatgtccgttcgtttactaactattacagcgaaataacgctattcctattcccttacagaatacttgttgccaattcttcttaacgtatttccattaaaacctttctattgacttgtcaatacaacttgttataacatgtatgtataacaagttaggaggagaaatgaatggaaacaaaagcggaaattacacggtacttggattatttgactgaaacatggaagtctgtcaccgaaaacgaaattgaccacattaatcaagctgctgagttcatttttaattcttgtaaagatggaggccgtttttatgtgtttggatctggccactcacatatgattgccgaagaaatctatattcgtgccggtgggttagcctatgtaaaaggaatattacctccagaattaatgttgcatgaaatgcccaataaaagtacttatctagaaagattggatggatacgccaaaagcattctaaatctatacaaagtggatgaaaaggatacgttaatggtcgtttcgaattctggaagaaataatattcctgtagaaatgtgtttggaggcaaagaaactaggaacaaaagtgattgcattgacatcaatggaccatgcaaagaatgtgtcttctcgtcattcctctaataaaaaaatacatgaaattgcagatgtgacgattgataatcatgctcctaaaggagacgctgcctttcaaatgcctggtgtcaaagcaggactaggaccaacctctgacttcacaggaataggcattgcccaaacgattatcatcggtgtcatccacaagttaaaagaagctggattggatgttcctgtattccaaagttccaatttagatggcgcagacaaatataacgatcacctatttgacacttactacggttactggaagtaatcccttctccttctcaattttcaagtaaaatgaacatacatgttataataagatgtattaaattttctttaaggactgaaaaggatgaaggaagcattaccgaaatatcaagttgtaaaagaatatatattggcgcaaataaaaaaaggggtttatttgccgcatcaaattattgaatcagaattagaattgatggaaaagctgaatgtctcaagaataaccattagaagagcgttagaggaattggtgcatgataaagtattgacaaagaaaaaaggggtgggcacatttgtgaacccccttcctaaatacacgggttttaaaccaggtgtaagctttactttggaagcaaaaaacagagggatgcgaccctccaccgaactattacaattaacaaaagtgtttgctgatgataaacaggcagaggatatgcaagtggcaattggcgatccattatggctagttgagcggatccgatatgcagacaatatcgccgtatcttatgagttagagtattttgatcatcacttggtgggcgatcttacaggagaaatatgcaaccattcgatttatgaatttttagaaaaaaagggccttgaatatgagtttgttgatcaaaaaatttctgctgtgttagctgatgagacttcctcaaaccatttaggtgttcctatagggtctccgctcatatcaattaaaaatattgcttgtttaaaaaatggcaaaccgtttaatgttggctttgctttatatcaaaccgattccttttatttaatgcatacgatttatcgataacgacaaaatggccccaatcaaggattaagcttttctttcgtaaaggagaatcatacgatgaaagtaatattggtgtgtagcgattaccaaaaaaagatgtttccatatgataaagaatggcaaacggctagtctagaaattttaaacacgcctaatattattcggcaaatcgacttttttctacaaaatggtatacagccaaatgatctatatgtgtatctagcctatcagcaaaaccaagtgattccccttcttaaacaatacgaaggcatccatttaggtaagaattataaagacttccgagaatttctttcagcatatgtctccacctttgatgatcaaacacttattgtgaaatctgattatgtgtttgtcaatgaagatctccatcaagtgataaaccaccaagatacagactttgtattgttaaccgagaaacaggaaagtacgaaagccatttgtgcaaaagtggcaaatgaaaaaatcacttattttttaggacatccccgagatcattatgtgacacatgaagttgctggtatctattgtttaagcaaacaagcattagattatgttattcatagttcaaatgggtttgataaaagaatttctggttctatgatacctgatcagttttatattgaaaacggcttgaatcaatttattgaatccggaaatcaaatcaaaagtgtcattgctcaatataacgtatttcaactattgtttccgtggagtattctcgatgccaatagttatcatctgaatcgattagtcgatctcctttcagaagagtctattagctccagtgcgaaaatcgaaccatctgcttctataaacgggaaattgaagatgggggaaaactcctatattggaaaaaatgtaattattaacggaaatgttgttataggcgaaaatgttgtaatcgacaatggcgccattctaaacggcaatatcctcattggagatcattcgtatgtaaaagattatgcaaagattgagggaccaacagtaattgggaaagaaaacaaatttggtcacaatgcagaattcaagggcgtttctatgaagggtgtctctgccattcattatagtgaaatgtttggtgtgattggacgttacgtagatattgcggcagcatgcgtatgcggcattttgagatttaatgatacagaacaacctcataaaatctctggccaaacttacacagcaaaaaattcaaacgccgtatttataggagactatacccgtacaggcatcaataatgtatttttgccaggaaataaaatcggtagtaattccgcgttataccctggcttaattgttgaaaaggacgtacctcatgaaaccatcgtgctcaaaaaacaagaaaccgttgagcggcattggggtccaaacaaatacggttggtaaagttcttgaaacacctcttttgttaagcaaccgactaaattaaaatgggaatagcctactagcattacaaaagcattacaagtcataattgaatggctataacgcttatacggcaagtgatattcctgtaatctaacttacttgattatgcccaactgatctccattcggttgggtttattttctcttaaaaggactattgaaaaacacacgcggctttgtttctatggctttacaatgcctgttcattttccgtttaaatagagagcaagtctcacatctacttaaacgagcctaccccgtttatgagaattctcctgccccgaattttctcatcgaattgaaacttccaatcttgcatttcaccccatttatagtctcccctaccctacactattattctgacttttttgttgattactagctattacagcgaaataacactatttctattcccttacaagtagattacttgttgccaattctgttgaaaacggcttttgctttctgtatagtgtgtacttgcgaacacaacatcccctttttaactcgttatgttctaaaacaaacaaactagtgttgggggattcactagttgaataaggagagtgcaagacatgaaaaaactaatcgcttcacttgcagtagtcggctcaatacttattgcttctcctgcttttgcttatgaagtacaaagtggagatacgctaagcagcatcgctaacaataatcaagtttcagtaacggcattaatggaggccaacccgcaaatttctgataagaatctaatttttgctgggcaagagctaaatatgccaggagctgaagaaagcaacgaaccgcaattgaaaggcgagacggaaacaaatgaacaagctccttctgaaaccgagtccagcccgaaggaagcttcaacgactttgactgttgaagcaactgcctataccgccagttgcaatggttgcacaggcgttacctatacaggaattgatttaaatgcgaacccaaaccaaaaagtaatcgcagttgaccctaatgtgatccctcttggcagtaaggtctatgttgaaggctatggtgaagccattgccgcagatattggcggagctattaaaggcaataaaattgacgtgtttatccctaatgaaagcgaagctttgcaattcggccgtcaagaagtaaccgtccaagtctattaaacaaaaaatgggcgcctgatggcgcccattgattaaaaaaacatttatctgctaaataaataacaaggctttttagcgtttatatacataatctcaaactcgttttatcgccactattgcccctgttgttgcatgaaatggtgcatagcgccaatgagattggcgtttccttggaaatggcaacgtgcaaagcgtggcatgtgaagggtgtagtcggaaagctggtctttcaattgcatataggcatggcggacaccgtctaataaatcgtcacgtgctgaaatgccgccgccaagcaatattttttctggattgtaaacatagtggacattatggatacctgccgctaaacaaaagtaaaaggcatcgatggccttttttgcagcatgatcgcctgcttcataagcagcaaacacatcacttgcggttaaacgatcctctggctggcctgtccacgttgcgtagcggcgggcaatggcagaagcggaggccatctcactaaatggcacagctgttctctgaacagggtcaatggataagagtgtgtatcctaattcaccaccgaggaggtcaaatccccggtgcaactggccatcttgtcccttcaattaaaaaaagccaactcctacgatgtaggagttaggccctttattgctaaattcaaattcaaatatttctcttgttctcttaccaagtgtgctactttatcaactggcacacagcctaattgacatccactgacagccgccttgccaatatcaaagacaaccaacaagtgtatgctttgtttataatggttcataataagctccacaggagagtgattttatgactttaaacaagcttctatctggattatttgtttttatttctctatttacaggtggtatggaggaccctttaacccctgatccaaacaaacctttaggcgacgttctcccaattgaaaaagccgtacaagaatttaattacctgtacggaattgaagtggttttacctcaatacttaccgattcattacacaactcaaggtgggtcgattgatcaaggtgcactaagagtcgactatatggatcaatccaataatgaattactaagtataaacgtttttgtcggggagaaacatctagaaagtgagaaacgggctaaagaagtattactaaataaaaatattacaggctatcatttcattatgcctgattccaacatcaatttcttaatctttagacaggatgggctaacctatatcattgcactagcctcacactacaaggacaataaggtggatgaactaatcaaaatcgctaattcaatatgattttgatagcccgaataatcacttattcccctctcctcctgccaattcattataagaggggatttaacaccaagcacaaaaagatttactttgtcgtgaccgggataagaatttcaaaatgaggatccagcaaatctcgatcctttggatatcgttcatgcttaattggtaatgggtcataaaattgtctactcgaatcttgaaaaggagtatattcactttcagctaaccattgcttaatttgctcgtaggtttgtccgatattttctcctttttgatgagttgtaacgaaatacgtcatttcgggcacgtctatttctaccattccttcaaggagaggttgtgtgcgttttacttcaaataccgaataatgttcaaagccatcgtttctagtatgatacgataatccgagctggatatttggatttatgacaccctttaactcttctactcgatgttccattgtatggataacttcttttaactgactgacatctgaatagggaccattccatttcatccccatcgctcgataagcgggcaaagtgacaatatcacactgaaattttttcatcgagtgcactcccttttctaatcgttcctctctatcatattcgcctgtttctagttgaatcctttctaaacataaacaaaacggctttctagtagacactccaaaaagctgaacctgtatgttcagcttaaggtagcgaatagatcagtgtttctcgggcaaaggtttttgtgccgggaacgacgttcaccgctgtgaaacggccgcgagaaatcgggttgcctcctcggcctttatgcactcttggacaatgtcacgatggtcaagtacataaagcaattggttatatacacgttctaaatcttcggtgctgccttgtttgacacataataagcataccaactggaccggttttccattccagcttaccggttcttttaaggtgacaaaagctaggaatgttttttctgtttgtggtgtaatcgggtgtgggatcgcgactaaatttccgtacgcggttgaggcaagattttcccgtttcactagtgcctcataaaagcctttgcttaccacccctctttctcgtaattgtctatccagaaaccggagaacgtcgtccttgcttttgagcgattgttgtaaaaacacaaggcctgcttcggtataagagagcaagctgtcaccgtgtcttaactggatttcaattcgttctaagtcttccgtgcctaatatcgtattcacctctactacagggactggcatcttttttttaatagggatagaagtgacgattaaatcaatatttgttaagtcggcttggtcgatttggtagtattcagttgtatccacaataaaaagccgcttcttaaaattggcttctaatttatactttaataattgagcgctgcctctgcccgacgcgcatacaattaagatgcgcttcggttctttttgttggttgcggcgttcaagggcagctcctatatgaagggcaaggtagccaatttcgttttcatcaatgctgatgccaagcttatctttaatcactgcttggccaatgacagctgcttcaaaggccagcgtataatgctgtttaatatcggctagcattgggttgcgaatattcatgccgtaacggtaacggttgatcgcgggctttaaatggagcataaggctaacaagcagctcttggtcatttgcaatgttcaaatcgagctccctctccactttctcaacgatagccttggcaagcttataatactcatcatcaaacactttttttaagttatcgtttgcttgctcgttttctgcaactaggcgagtgcctaataaatgaatagcaatataagcaatttcaatttcaggaaaggataccccaagatgcgtgttaagacgggcaatcattttttgggcaacgtaatattcatgttggctgcaaatatccgacatatcttttgggtaaagggaaatatgatggcctgcttcgattcgtttaaaggcgatgacaatatgaataaataaattattaatagcaatatcagacaacgtgatcccatgttcctgcatcgtcgtcaccaaaatgtcccaaatgtcggacaagtgttcttctttcataaacgcggtcaattgcaggcttgttaaatcagccgcaacgttttttcgttcaaacacatactcagccatgcaaaaccggcgcttaagttcatcacctttaagatataaaccgtaattgggccttgtagcgacttgaagcccgtacctagctaaaatcaatttggcgttttttaagtcattttgcaaacttgatttgctaataaacagatcctcagctaagtcgtctaatttaatatactcttcagctagcaatagtttctgaattaaccggatcactcgctcttctgggctgatcggggcgccgtggctgcccgtcgtttctcgttgtaaaaattggcggaactgcgcctcatctttaatcgtcagcttatagcctttgccaggcacggattcaatgccagcatgaatgttggccaactccgtctgcagttgtttcacatcttcacgcactgtccgcggcgtaacttggttgacgctggccaagtaacggctggtgacgtacccctgtgtgccaagcagctctctcaaaattgattgtaagcgttgattcatgatgccctccttcctgtgaaaagaacgcaaaaggaacactccttttacgttctcaaccctcgttaaaatccattttgctgcgatactgcttttatccactccgcgctctttttcggtgtccgtttttgcgtttgcacatcgactgaaatgaacccatagcgatttttataggcattggtccatgaccaattatccatgaacgtccacaaatggtagccgcggacattgcaaccttcttgaatcgcctggtggagccattttaaatgcccttttataaactcaatccggtacttatcttgaatttgcccattttccataaaccgttcttcgttttggacgcccatgccattttcagatacaaacgactcaatgtttccatagttatcttttaaattgaccataatgtcataaatgcctttttcgtaaatttcccagccacggtaatggttcattttccgtccaggcatgtcataatggtcaaaaaaccattctggcataaacggcgacgctggattaggcaaatattcttttgccttcacacgccggggctgataataattaacgccgagcaagtcaattcgctgtgctttaatacgagcaacatcttctttttcataggtgggcaattgcccatattcatcaagcaaggcgacaagctctcttggaaaggagccgaggacaacagggtctaaaaaactgcggttaaagaacaaatcggcaatcgcagctgctttttgatcccctagatggtcgctgcgcgggtatgaaggcgtcaaattaaggatgatgccaatctttccatcttcgatagagcgtgtacggaatgccgccactgccagtgcatgggctaaaacggtatggtaggcgacctggaatgcccttcttgcatccactatgtttgggtagtgaaaatcgtaaagatagccgccctcgactggcacaatcggttcgttaaatgtaaaccattttttcacgcgatcgccaaacaagtcataacaagtagcagcatactgggcatacaattcgaccacttcgcggttttcccagccacctttttcttgcagctcaaacggcatgtcaaagtggaacaagttgacaaacggctcaatgccattagcgatcagctcatcaatgacattgttgtaaaaggcgactgcttccttattcacttctccctcgccgccaggaatcagccttgaccatgaaatcgaaaaacgaaaactattatgcccgatcgctttcatcatcgcaatatcgtctttgtaacggtgatagaaattagacgttgcactcggccctacttcttcaaaaaagcggtttggctcgagttcataccagtggtcccagatgttttttccttttccgccttcattggcagctccctcaatttgcgttgccgatacagccgatccccaccagaaatctttcgggaaagaatacgcatgtgccatctttataaaagtccccttttcgtacgatatatttcaatgatttcaattgccaaatcacgtacggtcatcgacgtcatcaagtggtcttgggaatggatcagcagcacgtttaactctgtccgccctccatttgcttcttgctggattaaatttgtctgaaattcatgggctttggccagctctcttcctgcctcttctattaactcgtccgcttgttcaaatgagcctgcttttgccgcttgaattgcttccatcgcgcttcctttcccatttccagcgtgcaaaatgatacggaaggaaacctctgttatatccgtcgatttctccacttttctcacccatcctatctaagctgttttcgttggtttgccttcgctttgttcattttcatagtattgcttatccatcactttcaagaatggccaccaaatgacaaacacgatcgccatgtttaccacttgtaagaccgctccttgccatgaattcgttgccagtgctccgctaataataggcggcattgtccatggcacgatcgctccatacggcgccggcacaagcccggccgccatcgtgaaatacgtgaaaatcgttaccacgactggcgcgaacagccacgggataatgacaagcggattcataatgatcggcaagccaaaaataatcggttcattgacattaaacaaaccaggaggaccgccgatttttccaagttgttttagttggcggctgcggccaatcaagaaaatcgcaataataacggctagcgtcataccggacccgccaataccgacaataaacgattccataaacggcttgctgacaatatgaggcaactcattgcctgcgttgtatgcgtccaagttttctcccgccaatgtgaaccaaatcgggtcaaggacagagttgataatgatttggccatgcaaaccgaaaaaccagaagatttgtgtcaacagcacggcaatgattgttgcagtcaatccgcttccaagtgccgttaacggcgcttgaaccgatgtgtacacaaaattttgcacggtctcaaaaggtgtaaacgaaaaggcgatacgcaccaacaagaaaaacgaaagggtcatcgtaatgggaatcaaagaactaaacgaacgggatactgcatctggtacaccgctcggcatcttaatttgccaatttttgtttacaaaaaagcgatacagttccgcagacacaaatgctgtaataatcccgacaaacattccttgtgcgcctaacacgccaactggaataacaccggtcgtctcatcgacgtgttgcgggattaaaatcagaaaagcagcaagagcagtcacgccgccaaaaagcgcctcgcctccgtagctttccgtcagtttatagccaatgccgacgatgacaaacgtcgccataatcgccaacgttgccgacgaagcactgccgatcagttcctggtactgggcgtaagtggcctcactcatcaaacggtcaataaatggaaggttggcgataacgacaaaaatcgaaccgaagataatgagcggcagcgccaccataaagccatcacgcaatgcggttaaataacgattgttgtttaacttgtctgcaagcggcattaatacattttcaagtacatccatgaagcgattcatcaaccatcaccctttccggcgactattttttacttattagctagttctagtgcccgcttcatcacagccatgccgtcgacacgcccatacgcaaccgcatcaataatctcaacaggaacaccaacttccttgccttttgcctcgtatttctttttcataaagcgcatttgcggtcctactaacagcacgtccgctttttcgatttctaccaatgccttatcttgggcaaccgcccaaatttccgcttctacccctaattcggctgcagcttccttcatttttgctacaagcaagctcgtagacattcctgctgaacacgccaacaacacgttcatcgtgcattcccccttaacttcgcatctttcacattcatcttaaaatgaatccgcttacaactacacctaatttttttccgcagactgcggaaatgatggaaatttagccatataaacggaaaaaacaggcataaaaaaatagagcaaacaaactcatagcgaggttgttccctctattaaaaacacttgttaacttccccagtgttggggcctctccacataatcaggcaataccgttgttttatcccctttagccgattgaatctgtgactgtgttaagaagagtgctccagccaagtttgccccgcttaagtcggcatctcgcaagtctgcgccaataaagtccgctcttcgtaagtcactattggtcaagttggcagcaatgagaaacgtccctcttaaatcatgccctttcatatcgacgttggtgaggtttgcgcctatataatctacccgtttcttttttgtcccgctgcctttccccttcttccgatattgtgaccggtatatgtcactaacttctatgaacaaaggatttattttatttctatgtgcttcaatatctaacgccaatatttcttccggtgctttaattgttaatgtataagttaaatcatacaaagcctgaatttctagtttaaagtctttggcttcttctaactcgatcgcttgttttaaatagaaaagcatctcgtggagctgttgaacaactggaaatacagaaaacatttcctcggccattcgattatcttcacgccagtccttacccttatagacaacttgtgataccttttgccctgccccaaaacattcgtaactcacacagccacgaaatcctttgtctcgtagtgactcgtgaatcgaacagcgatgatcggaacataagtggcggcacggttccccactgcctttatcataaggaaaatcactcgatttcatgtaaggcagagacacacagcacaacccaaaacagtttaagcaatccgattttaaatcgctttccatggataaacaactccctatataacgaacaagatatgttcattataaagaaattttgtgtctaagcaatccgtatttctctactctagtttacgcggttcactgaacgtctgctagatttcgaatggttgcaatgaaattcgcctaaaccctcatataggctcacttgttgatttgcgctaatttacgcaggacgttcataaacaaataatttatgcttttcgattggtacgttgtctgattaaaacttcctgtaagatagacatccatcgcttgcacatagaccataaaagaaccgctcgcgccgagatgcccccatactgtatatttttctgtgaacgggagaaattgcagtttcataagaccatatccgtattttaaacccaactgcatttttttcccagttttgcatgaggcgcaagctctcttctgttaccagttgattattaacgaatgctttcataaaaaccaagagatcttctaatgtacatactgtctgaccaccagaataaaaactactaaaactgcggtatagttcagcacttattttaaagtcgtcaagatagagatgggcaacggggttgtcgctttttacagcgggctcggaaaactgggctaaatatgaatgcttcatcttcaatggcgtaaaaatgtattcatgcaatacgtccgcatagggcttcgatgtaatcgactcaatgatcagcccgagtaaattgtagcctgtgtctgtatagtgaaagccttgccccggtggaaaacgcggtagtagatgttctttcgaccattcaatcgtttcttcaggagtccaaaagcgtgacgactgatcgagattttcacgcaagaatagtttgtggcgcttcggtttatcttcgaaaaaatcgggcagtccggatgtattgcttaataaatgtgttagctgaatatcagacgaatactcttttcccttaaaaatgtgtagcccttccaccaggctttcaggcaaataatgggcgatcggatcttcaaacttggcgagaccgttttccacaaacttcgcaaaatttaagccaaatacgctctcccctcctcttggcctcgcttgcatccgatcactttgcaagcaatcaattgcagagcgatttcactttttctccctccagctgtaaggcaataggtcttgcagcgaaacgatttggtcttctgctaccataacctgggtctcgctattagcgtcattcatttggctaacaaattcccggcatcttccacaaggaggcaaaatgcgaccatcccaatcaacggcaatcattttcttaatatggctttccccagccgtaatcatcgccgccgcagccgcatgttcggcacaaaaaccgacggaacaagccatatcaatacaaacacctgtataaatgttgccgcccgcagtttcaattgccgctccgacaccgccgacttcaacgacgtcagataatttccgagggtgtatcaccgctttcgcttctacgtaaagttgatcaaatgtcacattaccactccttttattcgcacttttgaatgaggatacctgactaaagcatataaatgatgcactctcttcctttgagaagagaagaacaaacttcgataacgcctttcagaaccgtaaccgaaaatctataaatttattagtaaaagagcgggaaacgaaagtggaacttgccagaatatagctcgccctcctttattccacttatttaacttactaggtccaataaggggctcttctagtaagagctttatacagtgcggttttttgacgcacctaggccgcataagagcagcattgcactaacgaaaaacaatagcaaaagtggaaggttccagcctgctgtcacatcatggaggaaaccgaacaaaatcggccctgatgccgccaacaaatagccaacagattgggacataccggataaagaagctgcatcgtaggcatctttcgtccgcaaacttaaaaagatcatagccaaactaaacgcacatccaccggcaattccgagtaaaatcgtccataacgaaataagtgcatgatggccgaaataaaagccgcctaatgaaacaaaaaataagaaagccattatggtgaccagtaaacgttggttcttcatgcgccctgcaaggattggcacgataaaagatacgggaagcgtagccatttgaaaaagcgatagcatccaaccagcgctatcttcactcaatcccctgcttgtcatcatttcaggcagccaagtgatcaaaacatagaaaaggagagactgcattcccataaaaagagtaatggtccacgccagtggtgaacgccacaggcttcgccttaccatcgccacattcgttgtgaccacaactgatgggtgactcccacggattcgagggaaccaaaatagcgcagcgatcaaagcaagtatgccccagactccaagtgcgccattccagccgaaaccgaaattacgggcgagcggaacgctgataccagatgcgatcgcaccgcataaattcatcgacactgcgtaaatccctgtcattagtccaatattattagaaaagtcgcgtttaactagactcggaatgagcacgttgcacactgcgatcgagaggccaagtaaaacagtgcctgcaaacaaggaaatagttgcactcaccgagcgaacagcgattcccatcataagcagaaccaacgcacaaaacaagactcgttccatcccgaaacggcgcgccaacgtaggagtgaacggggaaaggagcgcgaaagccagcaacggcaatgtcgtcagcaggcctgcgacagtgttcgataacccgagagattcacgaatcgaccctaccaatgggccaaccgacgttagtggcgaccgcatcgttagtgagatcaggacgatgccaaagatgagcgcccaactcaatgaagacgactgtttcgccacagttggctttatgccactttgtacgctcatggctgttctccctcgtcttgagtaataacatccttcgattcctctatatagcgatgaacggctgccacggcacgatcaccgtcctgagcgacaatcgcttcgactagttgccgatgcattgccacgaagtcggcatcaacttcataacgagttaggcttgtaatcgaatcatgcaacgcttcgccgatatggctatagatttcaatcaatatttcattatgagaagcattaataatcatttggtgtaattgaatgtccgctgttacaaactgatcaatgtccccgcgttttgctgcagcctcgcaacgttccaactgaagcagaagttcgtgggcctcatcgtcggttctccgttgggcagctagatgcgctccctcacgttcgagcgcataccggacttctaacgtttgcaacgtatcggagcgcaaaacacgttttttcagcacaacccctaaagcactcgaagaacaaacataggttccatctccttgtttcgtctttaaaagtcccgcatggattaatgcccgaatcgcttctcttaaagtattgcgactcacgtttaattcagccattaactccggctcggctgggatgcgcatcccgacactccacttgcccgattcaatcatattttccatttgtaacgccacttgttcaactagcgtttgccgatttgttttctgaagcatgtgtcgatcctccttcttgcacttgtcaaacataggatgtttggttgattggtattatatcatgtccattaaatgaaaatcaacaagcagataaatctacaccaagtaaggagaggctttaactcaagtaatttgatcaatggctaaataggatagcttacctcttttcctgctcccattttgcaattccacctatttgtattacaattaaaacataagataaagaatgcttttggcagaatggtgggacaacaatgcctgaaaataaacttgatttaattggaagccgtgtcagccggcaaacattggcgcaacaggtggaggaaaaaattgtcaacttgttgattacaaacaagttgaagccgggagacaaattgcctccagaaatggaattgatttcgatgcttggtgtcagccgcccagtgctgcgcgaagcaatgagttcccttgaatcattgggaattgtgaagcggaaaacacgggacggaacctatttcacagaaaaaattagcagcaaaccgttttcgaccatgctttcccttgtgaacgacaatattgaagcgattattgaagcccgtacttcgctagagttagggcttgtcgtttttgctgctgaaaaaatatcagcacacgacttggagcggttgcaaacgacgattcaggcgattaaagaaagtgtggacgatgattatggcgagcatgacttgctgtttcaccgcattattgcccaaagtgtagacaatccgattttgcaaggaatggtcgattcgcttttgctgacccacgcaaaagtaaatgtgcaaattaaacatagggaacgggataagacggtagcgcaccatcacgctatttacgatgctcttgccaatcgcgacggccaagctgcctttcgggcaatgcatgagcacttaatgtttgttcgcaacaaagtccttgagccgaaccagtaactatgaacccccgctctattcgtatcttctcttggctgcctcgtctaacaagttttctatcagatgagtgcagttatcgactttgtcgacaacctcaaacgtgccttatttgggcacgttttttgtggtttccaaatttaaaattgactaactatttaatttgtcttacaataaaacaaattaccataaggagttgatcggttcgatgcaaaccaataagctgactggcattctcggcttccctgtttcgccctttgataaaaatggggcgcttgatgagaatgcactccaccgaaatattacgtttttaattgaagaaggcttggaagcgatctttgtcgcctgcggggcgggggaattccatgccattagcaaagccgagtatggggcaatattggatgttgctgtagatgcgacccaaaaacgcgttcccctctatactggagttggcggaaacatccaagacgccctttccttcgcacggctttcagaagaaaaaggcgccgacggttatttaatcctgcccccctacttgattaacggcgaacaaaacggtctacgcgcttatttgtcagcaattattgaatcaacttcccttcatgcgattgtttaccagcgtgataacgctgtattagaaggggatacacttgaatcgctgctcgtctacccacagttagtcggattaaaagatggcatcggcaatatggagcaaaacattgaattcactcagcgatttggcgagcggttgctatggctaaacggcatgccgatggcagaattaacgatgcctgcttattggcccattggcttccactcgtattcatcggcgatatctaattacattccacacatttccagatgcttttttgaagctttaaaacgcggcgatcatgaggctgttcgcaccctttacaaggatgtccttctgccaattaatgtgattcgccgccagaaaaaaggctatgcggtttctttaattaaagccggaatggagatcgttggcttgcctgttcaagagcatgtccgtgccccgcttgtgcctgtcgaaaaaagccattacaagcagctggcgcagattttagaaaacgctcacaaaaagtacccacgcaatcatatttcgctatagccgataaggaaaggagtcttatttatggatgcacacaattttatttacggccaatgggtgcctgctgtggacggtcaaacagccaagagcattaatcctggcaatctaaacgatacagtcggcacgtatcaggattcgaccgaagccgatgtagaacaggcggtgcaagcagctcaagaagcagcgaagccgtggcgcaagttaagcggcgcagagcggggggctttcctttataaaaccgcagacattatggaagaacggcttgatgaaattgccaagactgcggcacgggaaatgggcaaaacattggccgaaacaaaaggcgaaacgctgcgcggcattgcaattctccgttattatgcaggagaagggctgcgcaaaaatggcgatgtcattcctgcaagcgatgcaaaggcgcttatgtatacaacccgtgtaccccttggcgtcgtagcggtcattacgccatggaattttccgattgcgattcctctttggaaaacggcgcctgctatcatttacggcaatacagtcgtcctcaagcctgcttcagaaacggcagttacatgcgcaaaagtggttgcatgctttgaagcggccgggttgccccctggcgtcttaaatttcattacaggctcaggggcaaaagttggccaaagccttgttgaacatcatagggtgaacgcgatcacatttactggttcgaacacaactggcaagaaaattggccaaacagcccttgccaggggggcgaagtaccagcttgaaatggggggcaagaaccctgtcattgtggccgccgatgctaacattgagcaagcagtagacgcgacattaagcggagcgtttaaatcaactggccaaaagtgcacagcgacaagcagagcgtttgtcgaccgtgctgtttactccacttttaagaaattgctattagaaaagacaaaagaaatcgtagtaggtgacagccttgatgcaaaaacgtggatgggaccactcgcttcccaaaatcagctagccaattgccttgcctacatagaaaaaggcctgagtgaaaaggcgacgctattaactggcgggcatgccatcgatcaagaaaaaggttcctttatcgagccgacgatttttgaatgccgagatcaccattcctccatcgcccaagaagaaattttcggccctgtcctggctttatttgaagtggacggcatcgaagaagcgcttcgtttggccaatgatgtgccatacgggttaagtgcttcaattttcacaaaagatattgccaatatgcttgcctttattgaggatatggacgctggtctcattcgggtcaatgccgaaagcgcaggagttgaactgcaagccccatttggcgggatgaaacaatccagctcccattcccgcgaacagggggaagcagcgaaagagttttttacagcgaccaaaacgatttttgtaaaagcataacaggccatgcaggaggtctttcctgcaattctatatgtaatcgcttacaacgaaggagggaattagattgctcaaacgttaccattccgatgtttacgccagcattgctctacaatgtttagcggtgcttatgtttgtcgcctccttgcgaatggagactttgacgattttatcgattggcgttggctcacgctttttgccaatgttgatggctgctggcatttttctgcttagtacggttcttttgctcagcgggcttaaaaaacaaacagagccagttagggaaacagcatctgccgttgacgccccagacgtagacaacaaccagccgcagcaaaaaacaagcgacgaaaagacaacggttctagcaacaagcctgttgctgattggctacgttgtagcactgccggtgcttggctttattttggcatcgacattgtacatggccgggcaatcgatgatgatgacaagtcaacataaaaagcgcttttttatgtttgttttgccgatatcgttcgcagtctctttactgctgtattacgtctttcgggtaggctttaacttaatgttgccaattggcctattcggctaactaatgaagggggcgtgtctatgcttgaactgattgaaactggctttctcagcatccttaacatagaaacgattgtgattgtatttatcggtgttgctctaggccttgtgtttggcgccattcccggtttaacggctgtaatggcgatcgcgatttgtttgccgattacatttgggatgacacccattaatggtttgtccttgttaatgggcctatatattggcggcgtctccgggggcttcatcccctctgtcctcctaaacatccccgggactcctgcaagcattgcctcgacatttgatggttatccgatggcacaaaaaggggaagctggccgagcctttgcgttaacgattgtattttcgtttttagccggtttgcttagcctattggtgttgatctttatttctcctgtcttagccagtgtagcgattcagctttcgccttttgagtattttgccattactgtttttgcgctgacgatgattacatccctttcagacggttccatgttgaaaggcctcattgcaggtatgctcggcataagcctggctacagtcggatttgctccgattgactcttatccacgtttcacatttggcctacctgaacttgaggctggcttcaacgtcctaccagtgctaattggcttatttgcgataacggaaattttaaaaacatcgtctgatcgaaagcaaattgaaacgaaaagtatccaaaccgcttaccgtttaaaagaccttggtttaagcttcagttattttttcaagcaaaaatggaattggcttcgctctaccgctattggcgtcatcgtcggcattttgccagggcttggcggatcggcggctaacatcatctcctacgtaactgctaaaaatcagtcaaagcatcctgaaacgtttggaaaagggaatcctgccggcgttgtcgccgctgaatcttccaataatgcggccattggcggggcactcgtgccgcttttatcgatcggtattcctggcgacggcgtaacggcacttttagtcggcgggttaatgctccacggcttaaaccctggcccgcttttgtttgagcaaaatggtgaagtaatgtacggaattttcgctgctctccttttggctaatgccttcatggcccttttgcttattatcggaatgcgtttctttatccgtgttcttcatgtgccgcggcatgtgctgttgcccatcattgtcgtcctttgcgtcattggcgcattcggtgtaaacaaccggctatttgatgcgctcgttcttgtgctttgtggtgtcattggttacatcttcgccaaattaaaatttccggttatgccgattgtgctcggttttattctcggcccgattttagaaaccaatttgcggcgtggactgatgcattccaatggcgactttcttccatttgtcacgtcaccaattgccgctgcctttctattgcttgccgctggttcgtttttaatggcaatctacaaaaatcgaaagcgttcagccactgtttaataaaggaggaatgacccgtgaaaacacatacgctttatcctgttcttttggcttctgctctgttgttctcaggctgtacaacggttggctttcatgcgccgacatttggttcagaaaagaaagtaccctctgccagccagattgacgcctacccgaaccgcccgattgaaattattgtcccgactggagccggcggggacaccgatttaggagcacggcttcttggccgttatttaggtgaagaaatggatacatcgtttgttgtcacaaatattgccggagctggaggaagcatgggctccagggaagtgctcgaagccgatccagacggctataaagtcttgtttttccacaacaacttgctcatcaacaagctatatggcttatcaacttttaaccacaatgattttaagattgccggcattgccctaatggatcacggcgacacgtttattgttcatggggatgccccttaccaaacagcaaacgaattagcgcaagccgccatcgaacagcctggtgaactttcgtttgcaacggaggtcggtggctatacacatttgcagatgatggcgtttgaggaagcgacaggagcggacttaaagccaattgatgtcggtggcgcgtctgacaaactcgtagcccttttaggcaaccaagttgacattgtcccgattgcctacggggtaacagccgattatattgaaaacggcgatttcgcctcagtcggcgtcctgtcatcagaacaacatgccctatatgacaacacgcctacttttttagagcaaggcattgatgtagagtttgagaaatttttcttctttgcttttccgaaagaaacgcccgatgcgattgtcgcccgcttttctgaagcgctaaaagaagtcgtagaaaacaatgaagcctaccaggaacaagctgaatcgtattacaccatcccgacttatatggcccctgaagaagcgacacgatatatggatgatgtgagtcattcctacgagcgcttgattgaacgtctagaaacacaaacgaactaaaaagggctatcccataaggtcaagtaactgaccttgtgggatagcccctttatttccgtttaccattttgtccctgtcacttcattcaaggcattaagcaatgcttttatgtagccaattgaataggcaaaaccaatgcttccataactccacccaatattagagtgggcccaattggcatttaaatctgggctgtctccttctaaaacggggacatgatcaggattgaggcatccatcatagccgactttttttaattcgagcagcagtttaaacatgttcatatcgccatcatcgaggagtgcttcctcaaaagcacccgctgttggcaaagccccgcgcacattgcggaaatgaatcaaaaacaagcgcccttttcggccgtaatgattgatttcatcgacaacaagggaactgcctccctcttctgcacgcgttcccatacaatagatgtaaccaacttgcttgctcgggaattcatccataatccgcctgtagccaaggccgccaaaaggcgttccttgcagcggcgaatcagacggatgcattcccaacttaatgcctgcctcttccaccgccgggactagttttccatacgcataaagaaagcgctcccaccattgctcatgggcttctaaagtcggcgcttcataaggcgtttggctaaaaacaaggctttcacctctcgccaaagccccgccccgttgccttgctttgtaactttgagtcaaatgattaaacgtatctccagcaaaccgctggcgtacaatcggtattcctgcttcagcaaatacgttgatggccgccaccgaatgatcgacttccttctcactttcttcagctcctgccataaaagcggctgataaatcaggaagcgtaacccggttaatgtcgagcccaaaggaacgaattcgccgtttcagccggagcaacgcatccaaatcaggatagccttgctcctttactccagggaagcttgaaccactgccaaaatcaatacaatccacgcccaattgtgtcatttgctttaagtcgccatctgataaatcacacgttgttgtcgtaaccgataccctcattcctgatccccctagcaaatttttgataaattaattgtaagacaaatagatatttcagtcaattacattttcacctatacaaaaaaacaccctgagcacaatcagcgtgttttcaatcaatgtcttttattcatgaagcatacgcctataatgaagggagacacgttgcttcgagatattctccaagtagttctcagctaattctgtcgcttgtcttgcttcagaagaaacaagttcaatccgcatcgccatatctcttgtcaattctttttccttctcctcaagggcgtcaataaacgcgccgctgcttgcgcctaagctggctcgcagcgattggcccaaagcagcttgaaccacataaagctgcttaagcgacagttcaagctgaagtcgtttccacacatagcttggcggttctttaaattggtgtgtaatcacaaccgctcctgtatcatcaggaatcatcactcgtcctccttcctattaccccgaaagtgtaaaaatcgcggcaacgttatgttcttcatcaaaaatatcttcgatcccttcacgcatcttttcaaggaaggtgtgctgcttttccaattgctccaccaaagctgcttcccacactggcccttcaggcaatgtgattccgccaatttggtcatggacgacaattcgctctatgcggctgcctgctggcgcatggcttttatttaacaagtgctgataggccttagggttgctttccatatcatcaaacgcttggacaagcgcctttttttggttttcgacatcctctacgacctcatgctcatacaggcgcacaaacgcttgcactttttcctgttgctgctcaacaatggataggccgttgtaatacgcttcgacagtggcacttaaattaacacggatttcctcgcctccgtgttgtgtgctcactatcatttggttgttgtagtacgagaccccgttttctgcattcagcgcgttcaacaattcatggatgctgtggctatggccgatttcatccataacttcttgcaattccttttctaaagcctgccaatggccatacaacttttcgccatgttcgattaacagcagcaaaaaagccacgtcacttcctaacagtccacttcctccatcccgaattaaatacggtgattctttatatacgtcttcaagatgcttataatcatgaaggacttccagcgattccgtcaacccattcaattccttaacaatgatgtctttcgaagcctcatcaatatagcctgcctcaaccaaatacccgaacacctcttcagccgaatcatttaagccttgaaccgtctccacgatcggccctacgttccgctggaattgcttaatatggtaaaactctgtcagtcccttgcttaacaaatcaaaggcctgtggaattttcgcccctacttgccctagcgcatgggaacgggccatctccccccgcataaagacaggatactctgacaaatcaatcgtgtccgcttccagcaattgttgaagatcagcctgcaactcgttaaaatcatcaaacaccgtccgcttgagacccgtcatttcttccaacacgtcgagggcaccatctactccattatccatatacgcatcagcggctggcataaaaatcgcttgccacttggcgatttcctcatctggcagattggcaagaagcggcgacagtcctgcataatttttgttcgttaccatcccctctttcgcttctactggaacagtcacaaaccctctcgtattttccatcaacgcataaagggggtcattgctcgaacggagctgatggatagaactggtgtcgattttttcttctatgtactcgacggcgaactgttcgagtttatcaggaggaagggtgtagatggcgtttttgtctgttctaagtagattgaagttttgattgacttctctataaaaatggtcatcaatattgtaaagttgatatgcattgatttgtgcgccattaaccccgtaaaccttgtcaaagctttcatttaatacctgagcggttaaattattgttatttgcgagcgagtggcctaaacctactgtcaatacctctttatcacttacattaaacgccttttttgcttcatcaacaaaagtgtcggcatcgattgcctgcgatgcgtcttttccttggaacagcccaatcgcattgtatagccaatcaccgggatcattagagccttgtgatattacgtaaagctgattgatgcttttctcctcgtcttcaaaataaattgctgtaccatcatagtccgattccaaattgttgctttcatttgaggaataaactttcatatctgctggaagctcttcgcccatttcttcaatataaattcgccgcacttctttttcaaatgcctctttagacataccctgtttcattttgtattccaactgagtaatgcgaagccaaacttcgtcttttattaatagttcgtcattcgccatctgtctctcctccgtcgctacgagtacctgaaaactgaatcgactttacccactcaagagcaaactctttttccttttctaaatgaatatcacatcctttagcttgtttgtttacgcagcttacatcgtacacaaattctatgacctggggggcttgttttgtagaaactttatatcccattacaacatattcattttgagccatttcttttgccccatagaatatcgtgctctcatcttcttgaatctcattccattcctcttcataatcccatctccaccttaaattatctaagatgcgttcaggtttttttgcatttcctccatattgatattgaaaatttcctgtatatccccggttttcatttttattttcataggaaattctaagcttttcataatggtccccatccacgccagacgcattctccataaacacagcctcttccggaaaccaaattgtaaaggcaccgatttttgagcgcattaaataatacccgtcagctaccggctctgtcgataccatcatttctcgcgaatgttcgctttgaaacgcatcaatttgcggcaagtctgctgggtccatttctgctggtgttttttctggttcttcttctggtgagctacccatttggccacatcctcctaacatgatggcaatgacaactgccagcaatgccttgcttttgttcattctgctcgactccttaggcctcactaccgcttttttatcatttttagcataaatatgaaaataacgacactgacataagacttgtgaggttatacccagagttgttacttgaaagcacttagaaaaggggaaatgcttctagactctgctctcttgttggttgtcttttattaatagttcgtcattcgccattcgtctcgcctccgtcgccacgagtacctgaaaactgaattgactttacccactggagtatataagcttcttcctctgccaaaaccatttgacaactttcagacttttcatcaacacaagaagagatataaagaaattccattgcttgaggcgcttcttgggatgatactttgtaacccataaaaatatagctttgataaccttcaatgtcctctattgtatatccatagtatgtaagaccatgttcatcttccgtttctttccattcctcttcataatcccagcgtcctcttaaattatctaaaagccgttctggttttttggcatttccaccatagttatattgaaaaccaactaaataccctctgttttcttcttcgctttcataagcaaatcttaatttttcgtagtggtccccatcaataccagacgcattgtccataagaacggcctcttctggaaaccaaatcgtaaaggcgccgatttttgagcgcattaaataatccccatccgccactggctcggtcgacaccatcatttctcgggaatactcattttgaaacgcatcaatttgcggcaagtctgccgggtccatttctgctggtgttttttctggttcttcttcttctggtgagctacccatttggccacatcctcctgccatgatggcaatgacaactaccagcaatgtcttgcttttgtccattctgctcgactccttaggactcactacccgttttttcatcatttttaacataaatatgaaaataatgacactgatataagacttgtgaggtttgaactagctggatgttctcaatggaaatcacctgtgttaaacttttttcaccggaattttccgaatgatgaataacagggggaattgtctatgagagatagaagttcggtggtcataataaaagatgagaaagtcgttttaattcaaagaattagagatgatgctatgtattatgttttccctggtggtggaatagagccaggggaaacaccagaagccggtgccaaaagagaagcattggaggagttaggagtcgacgtaaaaattaatgagtgtatttccaaaattgaattcaacggaactcaatatttttttctgtctgaaattatttctggaactttaggaactggacaaggggaagaatacctggacaaaaatagagatagcggaaacgtacttgccaatgtgggtagatatagacagtttatcattgattgatgttagacccagtgaagttgctttaaaagttcaatcgctattcgattgacgcatctcccaaaaaatcaacactctatataattgataggaaacgtaatgagatgcctccttctcattgcacggtatgtctatttgttgtgtttttggcgagtgtgagtcacaatttccccttgcaaatatgaatggcgtattcggttgattctattaagtctttttgccccttctgaattcttaaatttaaggctttgtgaaaataacttatagcaagatcgtaattttcttggtcaaacaaatttttggcataatgttgataaacaaaatctagtataccccgacgttcatcacatatttcggcttcttccatcagtttcttaaacatttgattagacgtataaaagtctttctgccattgatatgtgtgggccaaacgtagtttattaacaaacaagctattgtcattacttgtgctttcatatgtttgaatcgctaaccttaaatattttttactttcttccaattctttaataatccgcaaataaacgcccattaatccatagatttttgctacttcgtttttatcgttctggaatattggtatttgtttttttagaaattcgatacctttcatcatttcagcttttgacagaggaacttctcgcaaattttcatcaaaacaaaaatctaaattaaatgggatagcagacatgtccatccttttatttagaccacctttcaaagaatcattcgctaccgcctcgtcgccctcgctacgagttccaagaaaattgaattgatttcacccactcaagggcaaactgtttttcctcttctaaatgaatctcacatcctttaacctgtttgtttacgcagcttacatcgtgcacaaattctatgacctgaggggcttgttttgtagaaactttatatcctattacaacaattcattttgcgccattttttttgccccataaaaaatcatgctctcatcttcttcaatctcattccattcttcttcgtaatcccatctccaccttagattaactaagatgcggtcagtggtcagtttttttaaaatttcccccgtattggtattgaaaattccctgtatatccgcgattttcctccacactctcatacgcaaaacgcaatttttcataatggtcgccacgttggttttaaaaacaagcatgatccgaaaagcgccggaccatgcttgtttgctttaaactccttgctgttcttgtttgcctattactaaaatggtatcgcggtctcggtacagcaaaaatgtcgcaaggataaacgatagcaaatcggcaataggaaatgctaagaacacgccggtgatgcccatatattgaggcagcaacaacacaaggggaatgaggaaaatgatttgccgtgacagtgataaaatcaaggcagggattggtttgccaagagcttggtacaaaccgccggcgaccacttgtacgccagcaagaaagaaaccagcgaacatgattctcatcgctgttgtgcctgtctcaatcgcaagagggtctgtcgtgaaaattctcatcgaaagagctgggaaagccatcataataaagacaacgccaatcgaacaggcgaccacgacttttaatgtcagccaaatggtctcacgcattcgcgcaaattgtttggctccataattgtaaccgacaatcggcatcattccttgcataacgccaatcatcggcatcaccgtaaacatcataatccgctggatgatgccaaatacaccgacgtgcatatcgcttccatgttgaatgagcatcgcgttgatggcgatcatcatcaaactccctgatgcttgttggacaaatgcaggaaagccgacagacaaaatttcctttacgacagaaaaccgcagagacacgcttgtccaactgaggcgcaacgaactttcacctttaacgtaataccgcaaaataaagaagctcaccgctccttgggcaacaaccgtggcgacgcctgcccctttaacgcccatatcgagagcaaaaatgaaaatggggtcgagaatgatattcagaatggccggaatgaccatcgtcaccatcgcaaaccgagcgtttccttccgaacgaataatattatttgttgcaaatgtaaaagcaaagaataccgtacctagcatgatcgggaacatgtagtcataggaatacggcaaaatatccggagtggcgccgaataagacaagcaaatcttccagaaaaaatagcgccgtgattaaaccggcgacgctcatgactacaatgagcgcaagcactgtaccgaacacgcgattggcgtcttcgtgcctgttttctcctagccttctagaaatgacagacgcgccgccaattcccacagctgccgagaccgccatcatgatcatcatgacggggaaagcaatcgttagacccgccaccgcttcaatgccaacaccataggaaataaagagaacgtcgacgacattgtaaaacgccatgacaaacataccgatcatggctggaaccgatagatctcgaagcaattttccgatcggttcgtttcctaactttgtgctattgttcgtctgtttcatgataaaatccttccattaaacggttaacatcctcaagcattggaggataacgctccttgcttttcatatgaaccgtccttttccttttaacctaagagctctttgccatctcccctttttcctcaacttgctgcttagcaagctagctttagttagtgatggacagacagccaaaagttcgactctaatatgttctccatgaggagcgtgtttttccttctacctaattataggaagggaaacaccgtatactaatgaaatgttggggcacacaagtacagaatctgtctagaaggccgactccattaacccttacggccctaaccatacaaaaaaactgcagaatgcctgttctgcagcttaacgtaaacggctttactattgggaagacgccctaaaaaagaaaggcagacgtatccgcctttcttcaagttctttttacaagccccgtagaaaagttataaacttggacagacagacggattccgtttactctgcagcatgcagagccttgaactatgaaattacgtgtccaaaacaaatccaatctggctgcgcatcgtttaaacccctcctctttcaagtaatcttactatactggtgaaatagctgtctgtcaatgtatattattctgttttataataagctaaatcgtcattcatttgctggtttagagctgttaatttttctgcggcggtggcgatcgtttctaaggccgttccttgttcatcaaaggaggctgtgatttcttcaacggatgcggctgtctcttctgctacacttaacgcttgttccaccgagaaagtcatcgtttttgcttgacctgtaatattttccatttcattttcgataatataaatggcgccgcttgtcttttgaatagaagcttcgatccctgtgaatacttctgctgtttgtttgactgcttcttttaattcatctgagtagttgcccgtttgtccgattagcatgatgatttgctccatctcgtgttcaattccagagatgacctcttttatttcagctgtacgcgtattcgcctgtttcgcaagcttgcgtacttctccagcaacgacggcaaagccattgccatgttctcctgcctgggctgcttcaatgcttgcgtttaaagctaaaagattcgtctgctcggcgatgccattaatcacttgcgttactcgcgaaatgtcttggatttttccatataatttagtaatgccgatgctgatatcttctgacgcttggtgggaattggaatgggactgttccaagtgggaaaccatttctcttccttttgcagaagcaatggaagactcaacggatgtttccaccactttttgcttttgctcgttgattgattgaatcgactggttcaattccccgacttgctcattggctttttccagttggatggcttgatcttgcgttcctgacccgatttcattaacagctaaaagcatctcttgggccgttgctgatgtctcttctgctactgctgacaagtccgaggcccgatcgaggacattgatgccagattgctgcaaatcagcaaccaattttttcaattgggtcgtcattgtattgaatgaccgacctaaccggccaatctcgtcgttggactctggcaagttcgagtaggaaatgtcgccgtcagcaattgcagctgccgcagtcgccactgtttccagcgtttgcactcttttgcggataagccaataagcggcaagcaatgctgcaatggaaacgatagctgttaatgccgttatataataaccaagctcttgaatgtcgctataaaattcgctttcagttgccgtcatgccaatatgccagccccaaggttcgaagtatgtcatgtagctgatttttttacttgtacaccgtcttcaacacgattataaaacgtaaatcgatcttctacattttcctttctagcactttcgacaaattgttcccgatttgtcgtgtcttccggaatttcaccgatctcattagtagggtgaagttgggttgcgtaatcttctgtatacgctaccatatatccgtctgatttataagaaaacagcgatttggaatgctcatatccgttttctgttttaggtccagaaatcagcaaacgtgcccgttcctgcccttcttctagcgatattgtgccattctcgatatcctcttgtatggctgttaatagaggcagcgctgcatcgacagtatgtttcatatcaagcatgcccgcgtcaatcagttgatttttcgctaacgtatacgtagtagtgccaattgctaaacttgtcattagcacacatgctacaagcaaagcagttaatttaactaagattctattcctaaatcttttcatgaacatccctccccctttttgtatcggttaaaaagtgacagggatgaatattgcttatctcatatcaggatgcttatttcccgtcggcacgaggaaccgtttaaacgtagcctattaatcgaaaacctcgaacccgatcattcttctttcgtttagcggcaataacccgttttagctttttattaccagccagacaacacgccagtaagcaaagcaaatagcgccatccatagtgtcgttaaaaaggcccacttgaacataaaccgttgatggtcgcctagttctacttgcgcgaggccaatcaataaaaacgttgatgccgtcagcggactaaggggaaagccgactgtcatttgcccaagtacggacgcttgagcaatttcaattccaggcacgccatacatttctgccgattgggcaagaatcggcatgaccccgtaataataggcatcaggattaaagacaaggctgaggggcatgctcgcaacggcaacgacgattggcagcgaacgaccaagttgttcaggtacaaggtcgactagtgctaccgccattgcctcgatcatccctgtgcctgtcaggatgccagtaaaaattcccgctgcaaaaataatcgataacaccggcaccattcctgacgcctgcagctggatttgttgcatttgttcttttggattcgggtaattcattagcaacgcaagcacaaaggcaataataaagacaacaggcagtggcaaccattgcatcaccaatgttgttaacgtcaaggcggtcaacaacaagttgggaataaacaactttgggcgtttcatgttcatttgttcttctgtttggccactgctcattgaatattcaatcgattggataccaatgcgttgtcgctctttttttccaatccagtacgcgacaaataaaagccaaagaaatcctaccgccatcgaaggcaatagtgggataaatatttcaccaggatcaatgccaagcgcgctgccggcgcgggcagtcggacctccccacggcataatattcatgaggccagctccaaggccaacgattcctgccaagacgattctgctcatgccgagtcgatcataaagaggcaacaaagctgggatcacgattaagaacgttgatgcccctgaaccgtcaagatgagcaaccatcgcaaacaatagtgtgccaactactacttttaatgggtcgccttttactgcttttaaaatccgggcaagaatcggatcaaacatgcccgcattgttcataacgccgaaaaacaagatcgcaaaacctaacataacgccagtcggggcgacaagttgaatgccctcgagcatgtgctcgccgagctcaaggccaaacccggcaatgatgccaaaaacaattggaatcaacacaagtgcaacgataactgacagccgcttcgaaacgatggaatagagaaacaccgcgatcgtaagaaaaccaaataatgctagcatgaaatccctccttatttaagcgctttcaattgtataaaatactaaacgagcatagacgatacccgctcgtttataaccaaacttccatttcaaggagataccaagagagcgatttaccatgtgcatcaaaatcaagggcggccgctacgccacctggacgagtgccatggatgacaaaatggagtgcggccaattgaggaagctcataacggtcaacactgccagaggctagtcggcgaaaatgttgcttgaccgccgttgccgttatttgttgccttacgttttcgtaaaatcgttcatcgtacagaaacaggctgaccgttgtctgttcgcctttgtcgcctgcccgagcatgggcaattttatataaaggtgtagtcatgctattacctccgttacgaacacttttgtcttcaccatggttcgtggaatcgatgctgaataggcagaaacgacacgttttgcctgtgatcgaactccgcctggaccccctgggccatttagccacaaggcttccacttcttccccaacacgttcagcttgccggcggtccttcgctctagcagctacacggagaaggacttcatatgggcgggcggacggctcattctgaaaaagcccattcaccccaagcaattcatgtttaacctcttgctggttaaatcctgcacttgtcaatcgggccaatacgatttcagcggcgagacgggcccgttcagctgcaccgtagcctccataggcaatcatgccttcaccaatgtagccttggttcacgccaattgtcgcttttagttgagcgggccgctcacgaccgtttcccccgttcactgcaatccggttgtcagcaacttccttaaaccttacagatgaaaaatcggcggtaacatcgggcgtcatataggcagttgggtccattacttcatacaataattgctctttgcatgtttggagcgtcaccgttcccccgcttcctggcgttttcgaaatgatgccagtcccatcagcaaaaacatcagcaaatggcattccgagccggtgcaactccggcacacgcttattgcagccatcagcaaaataaccaccacttacttgggcgccgcactcaagcaagtgggcaagtactgttcctgcaccaagcaaatgccaatctgaaagctcccagccaaactcataaaccatcggcgccaaaaataatgaaggatctgcaacacggccagttaggatcacatcggctccttgcaccaaagcaggcaaaatcgcgtcaactcctaaataagcgtcagcggaaataacatcatcaccgaatgtggaaagaggggcgcccgtttcccataaaggcgggtcggcttgttttgcttgttcaagcacatccgcaccaattactgtggcgactctcagctttgaaagaccgagagaagaagcaatttctgccgttttctttgcagcactttccggattagctgcccctaaatttgtaatgaccgttacccctttgtcttggcataacggcaataaagctgccatgcgttcttctaaaaactggccatagcctttttcacggtctatcgctttttctaagtgggcaagcgccgttgtccgctcagcaagcccttccaacacaagataatctaaatccccgtgcttcactaaatccactgctgcatcaattcggtcgccgccatagccagcgccagtgccaatacgtatcgatttcatactctccctactttctgccatctttgctatgcctatttgaatgcaatcattgtgccaactgttaatacgcgaacttcctaggctacaaggcgccatttctaaaaacaaagaaatacattctaataattaagaacaaaattggccgtttatcgcaaaggctgatatgataatgaaaacgcttaaaaagggggcttccaagtgaatggacatgccattcttgatgccattcaagacggcattcttgtcattgacaagcaagggattgtcaagaaaattaataacgaatatacacgcatcacaggcgtttgtgcacaggacattatcggcaaaccccttctagaagtcaggccagaagcacaacttgtttccacgctaaaagacaaaagcgtacgtgtcggcgtttatagaaaagtcaatggccgagaatacttagtcgatatggcgcctatttttgatggcgaccaagtggtaggagccgtttcaatctgtaaaggcaaacaagaagtgctggatttgacaaagacaattgaacagcaaaaacaacaaattcaatggttgcagcaaaaagtagaagccagttttcaagcggcccatcattttgaatcgatcattggatataatcaagggttaaaagaggtaacagcgattgcccgcaaagcagcaaccgctccttttccagtcttgattacaggagagagcggaacagggaaagagctttttgcgcaggccattcatagaggagggaaaaatgcctcacagccgtttgtaccaataaactgtgcagcgattccaacagacttgctcgaaagtgaattgtttggctatgaaacgggggcttttacaggtgcccagaaaaatggcaaacttggcttgtttgagttggctgacaacggtacgttgttcctcgatgaaatcggcgaactgcccctttccttgcaaagcaaactgctacgcgtcttacaagaaggaacgatacggaggctgggtgctttaaaggaaaaacgcgtttgtacccgtataattgctgcgactaaccaaaacttggcggacttagtgagcaaaggtttgtttcgcgaagacctctattatcgtttatgtgtgttccaacttcacattccaccgttgcgtgagcgaaaagaagatatccctttgcttgccaaaacgctgcttgccagccaatctgacgcgaaggcagtggggcaagtaaacattagcgacgaagcattggaaaggcttaagcactatcattggcctgggaatgtgcgtgaactaaaaaacgcgcttcaatttgccctttgcatgatggatgaacccgttttgcacccaagccacctgccgccgcatttggcaacggaccaatggcaaaggtccacgccaatgtcgtttactcctcctacgtcattaaaagcaggcctggaggaagcagaacggcagcttattacaaacgtacttgccaattgtgacaatcatttagaaggcaaaaagcaggcagcaaaacgattaaacatttccttggcaacgttatacaataaaatgaagaaacaccgtttgtaattgtagggagaatggaaaaaaaccggacggaaattgtccggttttttctgtataacttgcgcagaagccgttgccttttttaatgagcttccaacacagagcgctctgctaccatctttataaacgcttgatgcaagcgggcgtcatccgtcaattcaggatggaacgaacatgcaaggaaagagccttgcttgacggcaacgatttctccgttgtattcgctcaaaatgtctacatctggtccgacttctttaacaagcggcgcgcgaatgaaaacagcagtcagtttttcggctacccctttcacatcaagcgttgcttcaaaactatcccgttgccgcccaaacgcattgcgctcaacaaccatgtcgataaaacctaagtgcccatcttgctcacccgaaagagtctttgccatcaatatcagtccagcacatgttcctaatatcggctttcctgattcgccaaattctcgcaacggcttaaaaagttgatacttgtcaatcaacctacgcattgccgtcgactcaccacctggcaaaataagcccatcgacttctgctagctggtctgcacgctttatttcgattgcttctgcgccactgttcgttaataaacggatatgttcactaaccgcgccttgtaaggctaatacgccaattttcatagacttaccacccacggtcctgcatccgttctgccggcgccaatgtcgccacgtcaattcctttcatagcggaaccaaggtttttcgaaagctcggcaatccgttcataatctgtgtaatgggttgtcgcttccacaattgcccgagcaaatttttcaggattgtctgatttaaagatgcccgatccaacaaaaacgccgtcagcgcctagatgcatcataagagcggcatctgctggcgtggcgatgccccctgcggcaaaattgacgacaggcaattggcccgtttccttaatgtgcagcaataattcatatggggcgcctaattgcttggcttccgtcatcaactcatctgtcgacatatgggctacttgtttgatttgcgcctgcattttccgcatatggcggactgcttcaacaatattgcccgttcctggctctccttttgtgcgaatcattgaagcgccttcgccaatccggcgcgctgcttcgccgagatcgcgggctccgcagacaaacggcactgtaaaatcacgtttgtttaaatgatagacttcatcagccggtgttagcacttcgctttcatcaatataatcgacacccatcgcttccagaactttcgcttcaacgatgtggccaatgcgtgcttttgccatgactggaatcgaaacagcgtttaacacttcttctgtcacagttgggtctgccattctcgccacaccgccagctgcacgaatatcagaaggcacccgttccaatgccatgaccgccacagcacccgcttcttcagcgattttggcttgttcggcattaatcacatccatgataacgccgcctttttgcatttgcgccattccttgtttcacccggtctgttcctactactttttccatttgtcccactcctttatcgttgctttttttggatttgctgactagtatagaaaacaactgaccacattgtaagtgtcagtttttaagaaaatgatgaggtcagaaaaaggagcggtctaacatggagctgctgtggtgcgaattaaatcgagatttgccaacgcccttatatgaacaattgtacgcacacatcaaaacggaaattacggaaggccgcattggctatggcacgaaacttccctctaaacgcaaactagccgactctttaaaattaagccaaaacacggttgaggcagcttacgagcagttagtggcagaagggtatgtcgaagtgattccaagaaagggattttatgtacaagcctatgaagacttagaatacattcgggctccacaagcacctggagatgcgttagcaacaaaacaagacacgattcgctacaatttccacccgacccatattgacacaaccagctttccatttgagcaatggcgcaagtatttcaaacaaacgatgtgtaaggaaaatcaccgtttattgctgaatggagatcatcaaggcgaggcttcatttcggcgcgaaattgcctattacttgcatcattcacgtggcgtcaattgcacaccagaacaggtggtagtcggcgctggggtggaaacgttgttgcaacagctgttcttgctccttggcgaaagtaaagtctacgggattgaagacccaggctaccaactaatgcggaaattgctatcccattatccaaacgattacgtcccttttcaagtagatgaagaaggcattgatgttgacagcatcgtccgcacagcggtagatgtcgtttacacaacgccatcgcgccactttccttacggttctgtcttatcgatcaatcggcgcaaacaattgcttcattgggcggaagcacacgaaaaccgctatattattgaagacgattacgatagtgaattccgctatacaggaaaaaccattccatccttgcaaagcatggacgtccataacaaagtcatttatttaggcgccttttcaaaatcattgatcccgtctgtccgcatcagttatatggtactgccggcaccacttgcccacttatataaaaacaagttttcttactaccactcaacggtatcgcgcattgaccagcaagtgctgacggcctttatgaaacaaggggactttgaaaaacacttaaaccggatgcggaaaatttaccgccgcaagttggaaaaagttctgagcctgttgaaacgatatgaagacaagctattgataatcggtgaacgttccggcctccatatcgttctcgtcgtaaaaaatggaatggatgaacagacactggttgagaaagcattagccgccaaggcaaaagtgtatccactgtctgcttactcccttgaacgcgcaatccacccgcctcaaattgtacttggctttggaagtattcctgaagatgaattggaagaagcgattgcgacagtgttgaatgcatgggggttttaaattcacccatccctttctaaatggatcgtatgccctgtatcagggtcaacataagacgaatgagattcggcctcaacatactccaatccatttgtatcaggaatatctttaggatcaagatgaatgacatgtgggttcagtatcgtttcccgtagcagctgaggcgtgtctgttgtttgtggggtgtttgttggttgtgaggtgtttgttggttgtggcgtgtcttttgcctcagcgcagcccactaaaacaagtgcaagcatgggtattgccaaaagtctatacatggagaaacccctttcccattctactcgttaagaaaagggtacatgaagcgagttgaaaattcaatattttgccaccatcttttttctttttcaaagcggactgctactccttggcactcaacgctcgtgttttgcaactctagcatggagcttgcttaaagccctgcctcaaccaatagccttccgcctaccttaaaatccccttcaggcagtataaacgctgcttaaagggggcgtgtgcttacataagcaacttagagctgttggccgttcacgttatcgtgtaatgcgcggatcggtaaagatgtcactggcgtcgtcgctgtgggatgaaaattcactgataatcgccccttggggccctgcttgaaaccagtggcgcgtgtttggcggaatcgtatattgctcgcctggcaaaagcacgatttcttgagcggctgtgtagtaagcagcatcctcagcgggcgggtcgacacttggatcgtccgttgcctccccttcaacaaatagatggacacagccaaagcggcagcggaatgtttcttcttttccaggggtgccgtctggccgaggtgggtgtttatgttctgggcacgtttggttcgggaacagcaccaattccttggcacagtagcgcgggctgtttacataagtgaacagttgcaaaccgctttgctcaaggcgccctagcccaaagtcagcaacttcaatagtgtccgcttcttggtccgttaagagaaacccttgttcttcaagggcttctcgtgttttttgctttgccgtttccatatccactacttacaaccccttcgtcaagctgaagtcgtcaaggtcgacttcctcctcttcaggttcttgttccattgcctcttcctcttgtttgactgccggtttccacaatgacaacatcgtaccggtaatgaggctgccgatggcaagcgctaacacaaagtaccaaggttcaatcatcagtggtaccacaaacaaaccgccatgtggcacagtgcttccgactccccataccatcgaaagcccgccggcaattgctgagccaaatgagcacgaagcgacaacgcggatcaagtcccgcgcagcaattgggataaccccttcggtaatcatgcaaatgcccattggcacggctgcttttaatgtttctttttctgcttttgtatatttgtatcttgtaaataggaaagatagagcaataccgaagacaggcaccatggagccaatgaattttactgcttctggttcataaatgccttctacaagcagcccatcggcaaataacgaggccgttttgttgacagggccaccgaagtcaaaactggacattgcgccgaggatcgtccccataaagaagcgcgaaccaccttccattgattgcaacagacctagcagtgagttttgcatgctggcaatgggctggccaatgattgtcaacatgagcaaaccagagaaagcggttgcaattaaaggaataatcatgacaggcatcagaccaatcatgctctttggcactttcacatactttttgattgccaacacgacataacctactaaaaagccgccgagtatgccgccgataaaaccggcctggatttcattggcaataaagccaatgacgaggccaggggcgaaagcggggcgatcggcaatcgacatggcaatcgctgctgtaaaaaggggaacgacgagcgtcatgccccaaccgccaatttggttcaagtaaaaggggatcgttccttcatggttggcgacatcggctcctccgaagatttgccctaaagcaatgcacaagccggccgcaacaatcagtgggatcatataggaaataccagtcaacagatgttttttaatcgtcaagccgattgatttcatgctgcttctcccctttacacgtttgcgttcaattcagcttcgattttcttgatgagctgctttggcgatttgatggcaatatgtgtcgggatgcggatgacttttttctctttgaaacgatcgcgccccgatatgctaatgtctgctgcaatgatgacgacgtccgcttccttgatctcgtttgctgtcaactcatcttccgtgccgatcgtcccttgtgtttcaatcttaacttcgtgccctgcttcttgtgccgcttttacaagcttttctttcgctaaaaatgtatgggcaattcctgccgtacaagccgcaacaccaacaattttcatgattctccctcctgttcatcaaatgcctgtataatgtcgtcttttgagttcgattcaagcaatgcggcacacacttcatcgcgggcaagcgcaccagctactttggccagaagctttaaatgaagattgccctcatcttctttgcgtaccgcaaacaagataatcgcctgaaccggttttccgtctaacgtttcccaaccaattggctgtttcgtccggccgatggcaatcgctgtgtggcgaacagcatccgacttgccatggggaatggcgaccccgccgccaatccccgtcatgccttgagcttcccgctcatatacatctttttcaaagccttcttttgattcgatggccccattctcatcaagcaaatcaattaattctttaatcgcgtcttctttcgaggtcgcgcttaaatcaagcttgatcacatctttatgcaataactccgctagcttcattggcctatttcccctttcactcactgagcttgtacaacggtgctttgcctgttgaaccgaaaagcgccatttttttgcgcaacactgctttcgccgcttctcgggcttcaggcattaacacgtccggttcaaaatcgtgtggtttctcttgaagcgtttggcgcaactggttgaaaaaggcgcgtttcatatcgctagagaggttgatttttgctacccctaattgtgtcgattggcggatgtcctcatctgggttatccgagccgccatggaggactaatgggatgcctactgactcattgattttctccagccggtccagttggatttttggcttcatatgctttggatagaatccatgagatgtgccaatcgcgacggcaagtgtgtcgcagccagtacgttcaacaaattcccgtgcttcatctggttcagtgtaaagaatttggtctgcgcctccttcagagctgccgtcattgttgccgattgttcctagctcggcttctacggaaacaccgactgagtgggctatttcaaccgcttgtttcgtcaaggcaatattttcttcaaacggcaaatgggatgcatccatcatcaccgatgtatagccattttggatcgcctgggcaatatcagccaatgtcgccccatggtcgaggtggatcacgattggcacgcgagcacggtgtgctgcttctctggcgtaagcgataaactcattgcctataagcgccaactcattaggatggatttgtaaaattgctggcgatttttcttcctctgccgtctcaataatggcggatagcaattcgctattagaaacattgtaggagccgactgcaaatttttgttcatatgcgactttaagcaattctttcatcgtgataagcatatagtttcctccaagttaaggttataatgacaaactattccgaaatccttggtacgacttcatgtcttgaagacgtgccgttttactaagttgataaatttcgcgaaagattgattcgtacaacacggtgtcccgttcactcaccaacagcaagaacaccatttggactgtccgctccccccattggacggcacggctgttcatgccaacaaaaatttttgtttccggggcatcgattgaaataagcggatggggcacagccatgcggttgccaatgtctgtagcagacaattgctccctcgattcaatcgatggcaagtacacttcggctcctgccttttttacaagcaagcgcagcagctcttcttttgtctgcccatttaaacggaaaaagcaatcttcggtaacacgtgcctgcaaaatcccgtaagttaagcattccttaatgcgggcaatatcttcttttgtgatgaaatcgccttcaatatacaatgtcttatgctgtgtcttgagctccttggacgttgtcagtacaaacgcggcatcgcggggcactgcagaaggagcataaggaatataaatttcctgaatcgacacttgcggatacgcttgttccactttttgtttcattagtgtggtcatagccaaactttttgtgctaattaaaggaacacggattggctttcgttccattcggtcaattgccgcctgcaaatgaagggctaagtagcttacttccgcttcaggaacggaaatagacaacttttctcctagttcctcagcaaagacaaccgccatctgaaacgcatgaatgtattgggctttaatcatcgataacgatggagcttcgatttcatattggtcttgtaatacggacaacatattttgcaaatgcaacgttaaatgccttagcagcttttggtcgcctattaaatcgacgccgtactgcttctcgagtaacgacaaccctgctaagcaggccgcctgtagccgttcagaagcggctgtgttgccgtttttttggatcggaagcaacttgaaggcgatgcaattagaagcaagataagcaagttccccatcggggcaacatggccaaccaatcgcattcgctatttgttcagccagtttccagtttgctcctgcttgcgcgctcttgtttgtgcttaattcatgcgtttttccgcggtgcacagcgacaagtactacagccaataactttgcccagacactggccgacacatagatgctatttgcacctaaaacatcgcttaactttttgcctatatcggcaatgctttgcggcgtatgccatcctgaaaaggccgttgtcatttgtgaaattgcttcttgctttgcagcaaattcattgttgaacaaacttgtcaacaacatccgtttatcttgctcgttcccaagcaagcgaattccacaaaaaggctttgtgtcaaacatggcttttcggtcatactgcttcagccattccgacatcctcatcacatcactatggatcgtttgcggcgagacgaaatggctttccgcaaacttgtcatagctcatccatccatttgcatcaagcaattctttgacaagctgaaaagcccgtttatggtaatctaaatctaaatgagagcgcttgttaaactgcgttaatgtccctctcaatttatatccaaggcggttgttggaaacaatttctgcattgattaaatagtcttcattcaaaatgcgaatgtcattgcgaatcgtccggtcgcttacgcctagctgttcgcctagctcccggcctgacaaaaaacgcccctccttttcttttaataattggagcagtctggcatgccgtttcttcaatgcgaccacctcctaattctcactatagttgggctcgccttctcctgctaggctatcctatttcctaaatggttaggaagtaagcgctgtcataaaaggagatgataagaataacctataaatcgatttatctccatgtttattttatcatggttgtttcagcttcccttctagtaatttcatccattcttctaataaattttgccactggtcaatttagacgcactcaagcagaagagcatgatttagtggatgaaaaaaggaaccacataagacaatcgatacagcgggcataataaaaccgcccctctctaaccaaactggagaaagggacggttttacttactacttaaactctattttccatgaatgatcgtaatgcagctttcatcccatgttctcctatattctgcacatggaacgtaacggcttccttcaattgtgggacagcggttaaatcggtctcccaaagctgctgattgctaagaaatgcatgaattgtacgctgcaaatcctctccattatcatcggacagaatttgaatggaacgaagcgttttttcattctctctaatcggatacacagtatccccgcgtttgccaaaccatacatggtccttcacatgatcaggacgataaaagacgtataaagcggctagtgaaaaggttaaagctgctggaagcgcattgtttttccttaccgcttcgagaaaagaaggcagtatcctagttttccatttaaagatggagttcaatgaaatgtctaatagcttgtgctgattaaacggattgctaaacctttcgaatgtagcgtctgcaaagcggatcttttcctcttcattgatatgaagcaaaggcaaaatttcttcgtaaacgcctgttcggataaattgctggagttcctcatcctccattgcttccttaacggtatccaggccagatagatacgccgccgcaaacatcatggtgtgggcgccattaagaattcgcaccttcagctctcgaaatggagctacaggcttccaatggacgtttaatccagccttctcgaaaggcaactgtgccgctatttccggtttggcttcgatcgcgaataaatgaaacggttcacaggtggttaaaagagtatcctcatagcctagctcttgattaaactgcttaatcccttccctaggaaagcctgtgacaatacggtctacaagcgtattgcagaactggttatgctggtcgacccagtctataaaggattgagggaagtcccattccgttgccagcctaataacaatttcctttagcagttgcccgttgttgtccaatagctcacaaggaaataggatcatgcccgcttccttcgcaccttggaacgtttgaaagcggtgatagagataagcggccacttttcctggaaaagacaggggagaacgctccttgtcgtactcctcttgcaaatacgtcaatccagcttcagtggtgttggagaacataaaacgaacgtctatgttttctgctacctcaagaaccttttgccaatctgtgtaagggttaatccccctgctgatcgacgtcacaatctccctttcatctacctctgttccattcaacattccccgctgcgccaacgtatacaacccgtcctgtgcgtttaatttaggcaccactttaccgtgtggagtcggctgtatcgctacaatcgagccattaaacaagccctttttattcaacgtatgaatcatccaatcgacaaagcctcgcaaaaaattcccctcgccaaactggatgatacgctctggcaaatgcgcgttgcaagcttcgtttgcgtcctgtagcagctgcttttgagcttgattgtgagctatgaatttttttgataattgttccatttagaggtcccctttttatttgatgagcgttaaagggtcacgccatccttaaaaatagcgatctctttaaaaccgtactgctcattttttgtcttcttttctcccgaagcgacctgaagcaaataggtgaaaaagtcctctttgacatcgtccatgctgctgccttgaatgagctgtccggcgttataatcaatccagttcttcttcttttcaaatagagccgtattggttgagattttaaccgttggcacaggcccgccaaacggggttccccttcctgttgtgaacagcacgatatgggcaccagctgcagcaaggtttgtgacagatactaagtcgtttcctggcccttgtacgatgttcagcccctgctttgtaaccttagaaccataagggaggacgtcgacgacaggggcaaatccacctttttggacacaaccaagtgacttttcctccagtgttgtaatgcctccttttttattgcctggagatggattttcgtagaccggctggttgtacttaaggaaatactctttgaaaccatttaccacatcgactaaatcgttaaatacctttttatccgtaacccgctccatcagaatcgtctctgcgccaaacatttcaggcacttccgtcaaaatcgttgtccctcctgcggagataagcatatcggaaaacgctccgaccatcggattcgctgtaattcctgaaaatccgtcagatcctccgcattttaaaccaacttttaactttgatagaggaataggctcttttttaaatgtttttgcatagctgaccagactcccgagtaaatccagtccttcctcaagttcgtcctcgacatcttggaccgcgagaaactttactcgttctttatcaatttccgatagaacctgtttaaaagattctataaagttgttttcacaccctagacctaatacgagaaccgctgcagcgttaggatgctctacgagtcttcctaatattttttgagtgttatgcaaatcatcgcctagttgggagcagcctaggggatgaggaaaatgatagatgccatcgatcccttcctcttgaaatgcctcatttcccattttcgcgagaatctctgctgttttattaatacagcccacggtattgataatccatatttcattacgaatgcccgcttccccgtttttgcgccagtacccatcaaaagtggttgcggattcccgaacacgaaacggctgtgatttatgttgatactgatattcgagcgttcctgatagcttcgttacaacattatcggtgtgtacccaatcgcctttttgaattggcttgcttgctttgccaatagggaatccgtattttacgatgtcttctcctacagcgatgtctctgattgcaattttgtgcccagaaggaacgtctctggataaaggaatatgctcttctttaaactggatacgttgatctttttgcaagtcttttaaactgacgatgacattgtctgtcgggtgaacttgaaaaaaagcgttagacaaaatcaaaacctccttatttgttaaacacggatttaatctacctcacagtgtccagttgtcgctgaataccgttagagtggatggcttcatcgatccttatttaattaggagaacagagaaggcagccatagggaaattgctgggaaataggcaacaagcaaaatcgcaatgattaaaacaatataaaaaggccatgcctctttaataaaatcttcaattttcactttagtaattgccgttgtcgtaaacataatcgtcccgataggaggagtgatcgttccaacactaaggcaaagaataaagaaaagcccaaaatgcacaggatctataccgaatgtttgaatcataggcataaagataggtgttagtataataagtaaaacgttgccttcaataaacatgcctactacgagtaaaaagaccataatgactaataaaaacagagcagggctctcgataaaattggttaccgtgccagttagttgctgtggaatctgctccagcgttaaaatccagccgaaggccgttcccgccgcaataatgatcatgatcgtggccgttaaattgaccgattcttttaaagcggtaacgagctgattgcccttcatctggcgataaataaaaaaccctaaaataagagcataaataacggcaatcgctccggcctccgttgggctgaacacgccaaagcgaattccaccaataatgataatcggcaacaaaatcgcaaacgctgcatccttagaagcaatgagcatctcttttggtttagccgctggctttttttctgtttcaaagcctctctttttagcaataaaatgaacaagtattaagaaaatcacactaagcattaaacccggtacaatgccagctaaaaacaggttgccaatagacacgttcccgatataaccgtacataattaaggctatccctggtggaatgatcggtgtaatcagagacgttgccgctgttaatacagtcgagaaagcaggcggataattgcgcttcgtcatttgcggcacaagtactttggactgcatggccgcatccgcgatattagaccccgataaacctcccatcagcacactgagcaatacattgactttcgctagcccacctgtcatatggccagtcatgacttgggcaaagttaagcattctttccgtaattccggtatagttcatcagaatccctgctgttataaagaaaacgatcgcaaggagaggaaaggattctacgccactcatcattcgttggattaagatttcatgggtgaagctatcattcatgataaagtagtaggcgcagccggcaataatggcgtaggctacaggaatattcaatatgatcagagcaaacatgatgattaaagcgatcgttaaatccatccttactccagtcctctctcttgatgtatataagcccggtctcttttaataaacacgttaagaagatgaaacacggctagcaacgaaccgatcggcaccgccaaattaatgaatgtataactgatcccaagcactggggttactttggcgacaccgtgaaaggcaaacgcagccccccagtagacaaacacaaggatagtggcagccaaaatcacgacaagccttgccacctgaacataatggcgtattttttccggcattttccggacgaaataatcgatccctacgtgtgaattgtgcttgattccagagctaataccgataaacgtaagccatataaacaacgccaaactgacttcctcagtccatgtgatcggactgtttaagacaaagcggaaaaatacgtttgcgctaatgagaacaataattcctgataaagcaagaactcctagataatcatccaaatgatgaaaaaaacgcttcatgtttatcacctctacgttgttgtgagtgtaggctttcctctaagcatcgatccagcttctaccagagacaaaggagttgttcattccttctaatcacggttatccagcagttcttgaatcgtttcctgtagatcagggctccattcaggaatacggttaaaaatctcctgcgctctttctttaaacggctcaacatcaatctcatttatcttaattccttgtgaagcaaaatcttcgagaaccttttcctcctcctctgccacaatcgttttttcaaattctcccgcttcatcccccgttgtctgtaaaatgtcccgcaaatcagctggcagagagtccataaactcgtttccagtcacccatgggctaataatcttcgtatgtcccgttaacgctagaaatttcgcgacttcatgcgtttttgagccagagaggacaggcagcggattctcagccccatcaattacgccctgttgcaaggaagcatacatatcggatagaggaagcggtgtcggtgaagcgccaagcacactgaacgtgtgaatatacatctggttgtttggaacccggatttttagcccttttaaatcctctggtgtcagaacctctttcgttgtcatgagatggcgctcaccatagagtgtgtttgttgttacaatctctaaaccctcctgcctcaagtcatcctcgagcgatttaaaccaatcggttgtcgtcaagtagaataaatcctctacgtcgtctactagatatggagccgtcatcactcccagatcagggacaaagttcataaggaagtcatagcctgtaaagatgatcacattgctcccaaacagtgcctgctcaactacgtctgcttcagagcctagctgtgagctaggatataaccgtatattcaaccgtccgttgctccgttcttcggcaagctccttccacttccgcgccatttggtctactggttcacctggctgatttccgtaagcgatattcacggtgtaaacctggtctgggctattgcctgcatcagccgtactgcatgccgttaacaaagctaccattacaagaagtaggagggaggacattgttttcccattcttcattccattcagtccttacgtatagtttttcttattgctcgcctttgttgataacgctttcatttttgccataacaatctgttactctgacctgtaccaatttaaatcgttgatagactcaggcaagggacgagctaatttctcatcccttagagctctacgaccacctttatcacttttgattccggtaatagccagctatcaaactgttcaaccatctccctaaagctgcagcgatgggtaatgtacaaatccagttgaatagagcctgtttccaacacctgtataacgtagttaaaatcctctttggtcgcgttcctgctggccattaatgtcatttctcttttatgaaattctggatcatcaaattgaatcattccgttgacaagccctacgtaaaccaatttccccccatgagcaacatagttaaaagcttctgtcatggaatcgttgtttcccgtcgcatcaaaaacaattgtcggcaactcgtcattcagtcgatcatttagttcggacagagggttatccaatgcatggacgactgcatctactttggcccattgctggcaaaattcaagtctctcttcattgacatccatagcaatgacacgggcaccctgttccttggcaaaaagcatcacgcccaacccgatgggccctgccccaatcactagaacctgttcatttcttcttggcttcgcccgatttacagcgtgggcaccaatagcaagaggctcaattagggctgcttcatcataggaaagactagtagttttcattaattgtttggtaggaacagcaaccagctctctcataccaccatcgatatgaacacccagcacattcaccttcgtacaacagttcgttttgccgtttcggcaagcatggcaatttccacagcttaaataagggatgatcgctacacgatctcctgcttgcagcccttcaggattatgttcgacctcttcaatgacaccagacagctcatgccctagtactctaggataggaaaaaaagggctggtttcctttataagcatgaagatcagtcccacatatgccaattcgtttaatacgaactaacgcttcaccgggcctaattgaaggcgctttctcatttgtcatcttgaatacatttggccgttcacaaacgatgcttctcacagttttcctcctcattctgtccacccttcattgttgccaagattcattttatcaccataaataagttataaatattgcgtattctgctcaatatgtaccttttattgatataatataaaaagattaagattttaggtttggaaaagaggtgttgaaattggagcctgtccgcaaaacatttgattcagagaatgatttcccctttttcattgcttataaagatacgaaaacgcctaatcgcgagcttcctgaccatttgcacgactggtacgaaattgtctatgtctaccaagggaaaggaaccttttttatcgatcagaatttatttcaagctgagcagggagatattatcaccatccctggaaatacgatccaccgcgtcatcccaacagcagaaaatttgattacctcaacggctatttttttcagccccgttttattgcagcgctctgtattttgggattctcactcctatctaagattgtttgaggaaggcaaaggactcaaaaattacaggcaccggctagagccaaaaaaccgggctcagctcgaattgtatatcgatcagctctgggaggaggaaaaagaaaagcgcattgaccagaggcagatgttagcccttttgttgcagcaaattcttttgtttctaaaccgaaactgcctcaagagcgagcatgtcgggcatcataacgctgggccagtgtggatcaatcaggttcttgactatatcgagctcaatttagaaaatgagctcgaactgaataacctagcgaaaatagcagctgtgtcgccggcgcactttagcagggtatttaaaaaacttatcggcatgaatgtaacagaatacatcacaacgaagcgcatcattatggcgaaaaatttgctacaagaacaaaaagaaaacattgcccttattgcggaacaatgtggctttaacagcatgccacacttctatcggacatttaaaaggcttacgtccgtaacgccggcggcgtatcgaagtagctttgccaaatagatttttagaaaactgattttttcttctcttataaaaaggacgaggtaccaatgttagaaacaccacttcgctcatgttcacatccgtgtgagagatgtaaacatgagctttttgtcgacttttaaaggcgccaatgccatttccgctaaaaccattgactagggagtgaacgatcctatataataacaatgaaaattttacaaataataaacctctttttcataatctctttattcttacatgggacaatcatattatcgctatcattgccataacttaatagacgcagcctgatgaatacaaccctgattaaacgacaaggagtcgattgattcctgtgatgagggcttttttgcatgcttttaaaggatggcctgtgcatagtttcctcttccaattttgctaaggaggtgactgatggaacgattttaatgctcctttataagggaaccgagagaacgtaccgcacacgggtatcaactcgccgttcccgctggcatttttgcgtaaaaatgaaaaggggggttttgcaatgagacagaaagcggcgacgtttgtttgtatttcgatgatgggattgtttgttctcagtgcttgtggcaattcaaatgaagacgctggaacggaaagcgagggggaaaaccatcaaggggacattgtattagagctttggcaaaatgacgcgagcgaaaaagaaaaagtatatcaagatgcgattgcccgttttgaagataaaaacccaggtgtaacagtgaacatgcagtatattccgaatgacgattataaacagcgcatggttgttgccgtgtcaggaggagatcctccagacgtctttttttcctggggtggcagctggctaaaagagtttgctgatgccgggcaagtagtatcattaaatgactacgatatcgactttgataaatttcttgatgttgcactaacgaatacaacatttgaagacgaagtttacgggcttccgttagggcttactcaaacactgttcttttataacaaagaaatttttaatgaatacgggttagaggagccgcaaacatatgacgagtttcttgaaattgtggacacgttaaaagagaacgatattatcccgattacattaaccaaccaaacaaaatggccgggcacgtattatttgatgtattttgccgaccgcctaggcggcgaagacctttttcaaggggcttttaaccgtgacggtacagggtttgatgacgagtcctatgtaaaggcaggcgaatacatccaagaccttgttgacagaggtgcttttaatccaggttttaacggcgttccttacgatgcagggcaaggacggcaactgctttattcgggccagtctgcaatgatgctaatgacgaatacgtttatctctagcgtacgtacagaagcacctgaatttgaagagaaactagggatgtttgagtttcctgaaatagctgaaggaaatggcgatccttccaatgtaggcggcgcaacaagccccgtttggtccgtttcttcagccacagaacatcctgaccttgcagttgagctgatcaatgaacttacaagcattgaaacagccgaagattatgtaaaccgaacgggcagcattgccgctattaaagacattgaaacagatgacccatttattaagcgaattgatgaaatcgcggctaatgccaatgacattcacatgccttatgaccaaacattgccccctgctcttgctgaactacatctagatacaacacagcagctattcggtaaaacgcttacacctgaagaagcagctagtcagatggaggagaaagcaaaagaattgttagattaacagatagaagagagcgcactttttcgtctagtgcctctctttatctttataaaaggagggctacatatgaaaaccgctgttcaaccaggaacttctcccccgcttacacaaagaaaggcaaagagcggtcgaacgattttcttctttgtattgccagcgcttcttgtttatagcgtatttattatgtatccgattttttcaacattctattacagccttcatgagtggaatggtgtgcaacctcaacgcacctttattggactggacaactatgtgactttgcttaaagacgccactttttggcaagcgctgcaaaacaatagtttgcttgtgcttgtttccgtttttgtgcaaatcccactagggctgatcatggcacttgttctcttcagccctgtcatcggtaaaagattgttaaatgttatttactttcttccctatttaatgtctacggtagcgatagggcttctctggatttttatgtatgacccgataaacggtccgattaaccaattgttgcaaatagttggcattgatgcgatcccctggttagcagacgccaatgtagcgatgattgccatcttagttgtcgttatttggcagttctctcctttttacatgattttatttaaagcagccatggtagggattccaaatgaattgtatgaagcggctagcattgatggcgcaaatggaaggcaacagtttttttacatcacgttgcctgccctcgttccgactattgtcagttcttccgttctcgccgttgttggttcgctaaaagcatttgacattttttacattatgactggcggcggccctggaggggcaacagaaatactaggaacctatatgtacaagcaaggctttatccagtttagcatgggctatgcgagcacagtcgctgctgccatgtttattattgcctttatttgtgtagccatcatccaatttgttgaataccagcgaaagaaacgggggatcctctcgtgaatccactacaactcgttaaacgtatcatgctgtatgtgttggctgtttccttgttgctgtttacgttttatccatttatgtacatggttggtacatcgctaaaaagcatggacgaatttttcgacaacccttacgcgattgtgcctgacacctttacgtttgaacattactttgcggtagttgatatggggcttgctggctattttttaaatagcttaatcattacggtaagcgccgtctcattgacagtcgtcattgcttcattagccagttatccattaagccggctgtcattccgctttaaccgccctctgtttttgctcttcgttgcaggaatgatgctccccattcatgcgaccttaataccgatttttgttttaacgcaagagatgggcatttatgatacattgttggctttactcggtccatatgtcgcttttagcttgccaatctcgattttcatcttgacgcagtttatgcaggaaattcctaaagagcttgaagaagccgcacaaattgacggcgcgaatcactggaccatttttcgcaaagtgattttccctaatgtaaccccagccttgtctacaattgtcatttacaatttcgtcttcttgtggacagagtttatctttgtactcattttgcttacgacaagaagtaagatgacattgcctcttggactgcaaaatttttacggcgaattgatgattaacgtccctggcctgatggctgctatcacgctagctagcttgccgattttgttattgtttattatcgcccaagaacgtgttgtcaaaggtttgacaggcggcgctttaaaagggtaaatcgggttgtcccccttcttgtgcttgcctctggaggccccagaggcaaggtcaaccaaaatctttccatgtaaaatcaatgcttaacgtaccaacagccttttcatccgggtagtacgttttagctgaagcagcttctggcttgcgaaaacagacgaggttttggtgatgcccaaatgcacggcaaatcgctggacggactgagtgaatgccacaacaatcattggcttcgtcaaaaaagatgcacgtccctaaaaaacgctgttggttttttagggaatcgcgtcttttcgcaggcattttcttaatgtgtttttttatatgtcgcagctccctttcggaaataggcacaggcccacagcacaatcctttgcatcctttgcatggcaaatctcccactttcatctctcctctaaatggattcatttacaaacaacggcaaaaagcctttaaacacacttgaaaggacgctttcaagttgcttaaaggcaacgtttattgggttcgtttgtatggttattataccatgttccatcctctagtcattttatcgaattgaggatacgagtatttttgccttttggaagagaaatatttatttttttcagttattctgttatattaattcctacgtatgaactatttagacaagtgttgcgcacggctccaagcaaaagattcgaaatatacaaaacaagaaagtggggaaagagagatgacagaaaaacaatcatttggttttgaaaccattgctctacatggtggacaaacgcctgactctgcaacaaacgcgagagcggtacccatttaccaaacaagctcttacgtatttaatgataccgatcacgctgcaaatttgttttctttacaagagccaggcaacatttattcacgcattatgaacccgacacatgatgtgtttgaacagcggatggctgaattggaaggcggcgtaggcgcattagcaacttcttctgggcaagctgccattacatatgcgattttaaatatcgcgggagcaggagacaacattattgcttccagcagcttgtatggcggcacttatgccctatttgcgcacacgttgcctaaactaggcgtggcatgccattttgtcgatgtcgatgaaccatcccaatttcaagaaaagatcacagacaagactaaagcgatttttatcgaaacgattggaaatccgcaaatcaacatagcagacattgaagcgattgcagacattgcccatgcaaatgggatcccccttatcgttgacaatacgtttgctaccccgtatttgtgcagaccgattgaacatggcgcagacattgttgtccattccgctactaagtttattggcggccatgggacatcgatcggcggcgtcattgtcgactctggacgatttgattttgccaatggcaagtttcctggtttatcagagccagatgctagttaccatggacttgtgtatacagaggcacttggccccctcgcttacattacaaaagcacgagtcacgctgcttagagatattggcgcctctgcttccccatttaatacatttctatttattcaagggctggaaacattgccgttgcggatggagcgccatgtagaaaatgcgaaacgcactgctgaatacttacaacagcatcctattgtttcttgggtccattacccaggcctagagtcgaaccgttactatgatctggcacagaagtacatgccgaaaggggcaggatcgatctttacattcggcattaaaggcggcgtggaagaaggcaaacggtttattaacagcctacagttattcagccatttagctaatgtcggtgacgccaaatcattggtgattcatccagcaagcaccacacaccagcaactagatgaagaaagccaagcaaaagcaggcgtcacaccagacatggttcgcctatctgtcggtatcgaaaccattgacgacattctgagtgatttagaccaagcgcttcaaaaaagtcaacagtaggcaaataatgcccgctaaacaaacaatcgtctccctgaaaaaggaggcaaccttttgcataagcctgttccttgccttttagcggataaagacgattaggccagttgaaggttcaactggcctttcattaagtttgcgctctcctactcccctttaaataggagcactctagtttgcgagcgcactcgttcgttcctctaatgtagggttcgtctagaaacatggcgattgtcattttcaatttcagcaaataagttgctttcgctcatggcattgttgctttgccggtttgtttcatttggtggaggagcaccttttaaataatgtgccaacaaggcctccatttgtgcataagtgatcggctttgcccaatcaaatagttcatagccaagcccaccgtttggctcaatggtggctgtcttcacatcactcattttagatattccttgctggcgcaattgcatttccaaggcatcgaccgtcattctaagcttctttaagttttgtggttgcagttggccttcacgtataacgagtatggctggccctttgataaatgactcagctgcattccacctaacttggatcgattcagctagaaacaagaccaatataaacaccacagcggcaatgatcgtcaagagaatactatgattggcaattggctgtacaatgacagttccaatagaaatcatggtaatcgtcgtcggcactgtcatctgtgatatcgattttcggccagaaacccgtaacaatagcataccgacaatgattaatagaaacgctttccatacttcactccaaatagcgcccatttccacccctactcctttttcattccagaatagttttttccatttgcctaaagttcattcaatagccattctgaaaagggagcaacagtgcatgaaaaagcgagaaaaggacagactccatttgatggtattgtatccccgatgctatttagcaattccccaaggggagaacaacaaatacgttcctaaaaccgttaagatcaccaacacacttacccaattgcggtgtttccaaggtgtcaagtcgactttgttcgtttcttctgtcaattcaaacggaacctgtaatggctttaatcggcttagcgcccataaaagcaacaaatcgatgaaaaacatcacgctaaatacgtagagataatgaatttctaagaatatctgacttgcagtataggcaaccacatgaaaagcaaacgtcacttttgcagcaaaggcagtcgcgtacttagaatagaagccgagaataatgatcgccagcaacggcatgctgtacagcccattaaattgttggacgacatggaataaccctgccggagcaaaagcaatcaacggcgcgataatgattgatagtccaccgacaatgaccgtaaccattttgccaaagcgagcgactttattgtctgtcacgtttttcttggccaacggcttataaaagtcaagcgccaacaaagtagctgttgcatttaaagctcctacaaatgagcttaaaatcgcgccaaagataattgccgcaaaaatgccaaatgctaaatccggtagaacggcaacgactagcatcggataggcgttatcggcgggattaatgccgtcgccaaacatgttgaaggcaatgatgccagggaatactaagaacaacgcaccgaaaattttgaagaaaccgacataaagggctcccttctgcccttcttttaagtctcgtccccccagtactttttgaacaattaactggtttgtacaccaataaaataagttattaaaaaacatgcctaaaaaaagcgttggccacggcaccatctcagagtcaattgctccaattgaatttaatttttcaggcgtgttttggcgaatcgtttcaaatcctgcaagtaaatggccatctcctaatacaatcaaccctagaatcggaatagaaagaccaccgataagcaaaccaacgccataaatcgtatcgctaaatgcactaaggcgcaggccgccgataagcaaataaagcagaccaacgattccaatcatggctgaaatcaacgaaacagccacaaggggatggacatttaacagttcatctactgagaaaatttggttaaatactaatgaaccagaatataagacaacaggaagaaacgaaaccacataggtaaatataaataaaaacgaagcaatcctcttcgtcgttgcatcatagcgccgttcaataaaatcggtgactgtgtccacaccatattttaaatatttaggcaaaaatacgagtgcaagtgcgacaatcgcaatcgcagccgttacttcccaagccatgacttccatgccagccacgtagctttgtccattttgaccaacaatttgctctgtagataaattggtcataatgactgagccggcaatcgtcacaccggtcaaactccgtccacctaaaaagtacccttctgagctcgaaagatcgacattgcggcttcgtttgtaagcgaatagccaaatggctccgataatcatgataaatgacataattgaaactatacccaatttgtctctcccctttatcatcgcttctttccttaaaaaccgattcatccatcgatagggaacagcgctgcactacagcagtggttagtagactcctttttctgtttatacaagccaaataaggcgcacacacaaaaataggcaaatgtctctttctaaagggaggcctgcggctgcaataccactttcttgccgcttctcattgattcagttgcagcaagggctatttttaagttgattgtggcatcttcagccgttacaattggcgtgttccttgagcggacacagtcaataaagtgctgcaattctaaacggtacgcgtcacgaaagcgggtctggaaatcaggaatgatttcgtaccttgaaccagtggcatttaatatcgtcaatgatttgtcccgcagttcgccaataaacaaactgccttctgacccaataatttcggcgcggatgtcataaccataaggcgaattacggctagcttcagcatcgcctgccgccccattgtcaaattcaaagtaggaaagagcgtggtccacatcgccgtaggcttccatgaatggatacttcagcacccgtccatgaccggaaatcgctgtgatctccgccccgaccaaatagcgggcaatgtcataatcatgaatggaacaatcgacaaacagcccgccgctatcttttataaattcaggcggcggtgcgcctgcatcgcgtgtaaaacctttataataaagaggtttgccgatctctccagcagcaattcgccgcttggcatctgcgtaagccgggtcgaaccgccgcatgaaccccacttggcaaataatacctgcctcctcaaccgctttcgttacgtctatcgattcttctaattgcaaagtcagcggcttttcaacaaaaacatctttgccatagctagctgccagtttgatcatctcggcgtgcgtccgcgtcggcgtgacgataacgacggcatcgacggcagggtttgagaatgcatcgagtacgtcgtccgagtaactagccactccaaatgtttgggcgacatccttggcccggccaggaagggggtcaatcacttggacaattgccgcccccctcacttccgtcagcaaatttttcgcatggtaatagccgaggcgcccaagtccgagaacggcacattgaatgcgtgctgctgtcataggtttcatctcctttgtagacttgcagaaccagctgctttattggctgctccaaattgtttgattttcttttcgaccgtagcctggaccatcgccaggccctcttgcaagagcagtcgcggctcaaacgccgtttcctgctcggcaaatgttgtccggcaagcatcagaccatgcgatcatgcattcggtgtttatattgattttggcgtgcccaagctttatggcccgttgtagctgttcatcaggtatgcccgaggcaccgtgaaggacgagcggcacattcgtgctagccgatatggcggccatttcgttaaatccgagctttggctcacccttgtatttgccatggacggagccgagcgctgccgcgagcgcatcgacattggtttcacagacaaaccgctggcattcttcgacatcggcatatttgatttcggccataagcccatcttctatgccaccgactgtaccgacctccccctctaccgagacattgtgtgcgtgggcataggccactacctctttggtcatgtcgatattctcgttaattggataatgagaaccatcaaacatgacagaactgaagccagcatcaactgctttcttgcaacgctcaatacttaaaccgtggtcaagatggagcacgacagggaccgttataccgagttcatcggttaatgctcccatcattgccacaaccgtctgaaagcctcctaagtagtcaatcaaacgatcagaagcggctgcaattactggtgattgttgcgattctgcccctgccaaaatcgcttttgcccattgcagcccattaatattaaattggccaattgcgtaactgtctttcttcgcgtcggccaacaatggagccatcggcacaaaccccatgccttccctcctttcaaatttaaggtccttttaggactcttgcttttcggacagctgatcttcaggacgaatttacaataaagtcatagccatgctagtcgtagtaggccaggcctttctttaatgcggcattgttcccccgttaacacaacgtttcatcgctgtcttctcctatacttgctcaggcgtggctgctgagtgttgataaaacgcaggtttcttcggaagctcaatcgattcttcccggcccgactcttgcgcttttacacaggcatctgcagttacagcagccacatatccgtcccacgcgctcggccctgaagccggttcgtcctttaagccatcgtcaataaaggcttgcagttcgacgtcataagcggcttcaaaccgttttttccagtcttgcagcacttccgtccctttgcggccgttgctgcataaacggactgctgggacatcaggcagactgataacgccctcttcgccagctatttcgcattggatgtcgtagccatatttacagttaacaaaaatttccgcttgaatgatgacgccttttttcgtttcaagcaacacgagttgcggatcttgcaaatggggaagcgcatgctttgtttttttcggataaaggacacggacatgttgatactcgtcatttaggagccaatgaagtacgtcaatttcatgaatcaatgtgtccgtaatcgccatgtcggttgtatagctttctgctgactcgacattgcggtggatgcaacggaccattaatggttctccgaccaattcctgctcaagtgcttgctttaattgaagatagccgctgtcaaaacgccgcataaacccgacttggacaagccgcttgccatgagccatttccgcttcgacaatgcgcatgcacccgtctgccgtggtcgcaagtggcttttcgcaaaaaacacgcttgcctgcctcaagcgctgccagcacactcgcttcgtgtgctggcccccagctggccactaagacggcatccacatcgcgggcggcaatcaattctctgtcattggcataaacagtcgcctgtttggcgtatgtgttggccactttcctggcaagatcttggttaacgtctgtaaccgctgtcacttttgctcctgaaagtttgcattctaatcgcctaatatggtcttggccaatggcccccgtgccaatcacgcccactcgaactgtcatgttccttcctccttcatcttgtttaaatggttgcctgcttctcgccgcctgccagcaaataggaatcaatatagcgtcttgcttttaatgcgtactccagcgggtgggcaatgtttggatcttgctccgcctctacgacaatccagccatcgtagccccctcgaataagacgtcggtatacttttgtaaagtcaatgcagccatcgcctggtactgtgaacatcccttttaaaaacgcttgttggaacgaaagcccgtcacgcctgcaagcatccgtcacctcactccgcacatctttaaaatggacgtgcttaatccgatccatatagtcatcgaggagcggcaaaaatgctccatctgacacgtaggcgtgccccgtatcatacagaaggctcactaagctcggatccgtatgggccatcagttgatcaacttctgcttttgtttgcacgcccgtgccgagatggggatggaacgcaagtgtaaggccatatgaatgagcaattgccccaagctcctcaagcccttcgtataaacacttccattcttctttcgaaaaagtcggcttgtcacggaaaatatttgcttcaagcccttggatgctatacgtttgttccgaaacgatcgccatctctgcgccgatagcttgcaaaaactggcaatgggtatcgaaggcttgggcggctgaagcgatgccatcgcgaatgatatagctggaaaaccacttgccagccacttttaaatttcttagctgcagctctttgtttaaaatttgtggctcaggaaaaaagccgcctgcttccgttccttcaaatcgagcaacaacaatatcgccaagcaaatgggaaagtgtgttttccgcgccaatttccggaatgtcgtcattgcgccagccaatgggggcaatgccccagcggatcttgcgatttgccattggatcgactcctctaataatgttttgcttccttgagctttgcttgccttgcttgataggcatcttgaatagactgggaagcagccacttcggcgacgccgacattccaccagctttcatagccgtctgtcatcgtctttggcagcactttcatttcaatcaacgtggaagtctcttgcttcttggcatctttaagcgctgcctttaattgttcaactgtgttagcccggtatgttttggctccatatccttcagcgactttggcataatcgatgttcatcacttgattgtctgccgtaaggaattcgcaataataactgccgccgccatggtccatctgcaagttgctgatacagccaaaaccggcattgtcaaacagcaatatattgattttcttgttatattggatggcggtaatcaattcggaatggagcataagaaagctcccatctccgacgatcgaataaacttctcgctcaggctcggctagtttgatgccaagggcgccagaaatttcataacccatgcaggaatacccgtattcaagatggtacgtattcggctcgtttgcgtgccaaagtcgctgcaaatcccctggaagggagcccgatgaacaaataattgtgctgtcctcatcaatggtttcattaatagccagcaaggcagtcgtttgcggcagttctgtccccagagcatcggcatactcatttaacttctcttggctaaaatgctctttgacttcaggcacaaatgtttttctattaaagacgactgattttaggcggttccgttcagcgagccactcttctttcaacgcagcaattcgatcgccaaacgccgaccgatacgtttttaacctggaaataagtaggctaagcgtttctttcgcatctgcaacaacctgataagcatcaagcttatacgtttgcatgcggctgacattgatatttaaaaacgtggtatgctcaaaatcaaacgccgtttttgacgaagtcgcaaagtcggtgtaacgagtgcctacgccaatcaccaagtcagcttcacgggctgccttattcgctgcaagcgtgccggtaacgccaaggccacctaggttgttagcaaagtcagcggcaacagttgcttttcctgcttgtgtttcgacgagaggaatgccacactgttcagacagcgctactagttcttcctttgcttctgaatatttagcgcctccgccaacaacaagaagcggccgcttgctcctacgaatccgttcaagtgcctcttcgatttcccgctccgttggctttctacgttctaaataatgaatgcgctttctgaaaaactcctctggatactcatatgcttctccttcgacatcttgggcgatgcaaatcgtcgcgggccccgcttttcctgggtctgtcatgacttcaaaggcacgaataaggctcgacattaactgctctgggcgagtaatccggtcccagtatctcgacaccggctttaatgcatcatttgtcgtcactgcttggctgtattcttgttcaaattgctgcaaaactgggtcaggctggcgagtcgcgaatgtatcggcaggaagaagcaaaacaggtatattgttagctagcgctgtgccagcagctgcaacaaggttcgcggctcctgggcctacagaagttgtcactgcatatatttttttgcggagcatctgcttgctaaaagccattgccgcatgggccatcccttgttcatttttgccttgccatacgtttaatcgcccggcatcttgctctagtgcttggccaatccctaacacatttccatgcccgaagatcgtaaaaatcccttcaacgaaaggctcctctttcccgtcagcatgcaaatattgggcatttaagaacttcactagcgcttgtgcagtcgtcaatcgtattgttttcgccattgtttacacctcgcatcatcactacgcgtttttatttaaagaaaatccgacattcaaacatgctgttcttcgacaagcgccttgatttcagataaagttggcattgcttccgatgaactgtgcttactgacaacaatcgatgcggaagcgctcccaaaacgcaatgcttgatcaatgtcataaccacgcaaaagtccatatagaaacgcagatgcatacgaatctccagcaccaaacgtttttaacacgtttgttttgtacacgcctgctcgaaaggtttctcctgatggcaaataagcgtaagacccatcaacaccatgtttaataacaaccaattccggctctttggcaaatagcattttggctgtttgctcattgccgctggcacttgccccttccataatgtcatactcttcccgcgtgccgatcacgatatgagccatgcctgccagaagtgtgtagtaaacggacgtttcttccctcgatgaccacgtgtacggacgataatcgagttcaaacacaacttttgtacctgccgcctttgcaagtgacactgcttttaaggctgcctcccgtgaaggcgattgagccaatgccgttccagaaatgagcagtacttttgcagatctcacataaccggcgtcgatttcatcagggcttaaatataggtcagctgctttttcacggtacatcaaaatgctgcattcttcagggctcaaaatttccgtaaacgtcaaacctgctttatgcccttctcggtcaatcacgagctggcttgtatccacgcctgcctctctcatataagaagaaataaaccggccatgttggtcatcaggaattttaccgacaaaaccgactttcaagccaagcttcgcgctgccaatggcaatattggctggcgaaccgccgacatattttgtgaatgaccgcgtttcttccatcggccggttgtattcggccgcatttaaatcaatgcaggccctgccaagcgcaatcacatcaaattgctttccctcttgaaattggatgcccataggctaccgctccttttatcgtgataaaatccactcatggtctttttcattacggaatttccaaatacgtacagggcctgccattacgtttaaatagtaggacgcatagccgtcaggaacgccaactggatggtagccagcaggtacaatgacaacatcgccgttttcgacagccatcgtttcgtctatattacgtgactcagtatacacacgttggaacacaaacccttgcggtggatcgatttcatggtaatacgtttcctctagaaaagactcgtagggcaaattatcctcatcatgcttgtggggcggataactggaccaattgccgctttctgtaaacacttcgacgactagcaaactgtttgcagtcttgtctgaatcaggcaatatattatggactaagcgcttgttctgtaattggcccctgttttcaatgccgacgtcactcgctttaataagttttgtcggcaattgtttgtttgaaggcgcatagcaaagagcgatgcacgcctcacttgttccagttaccgtaaatgaacggccattcgagagatagacactgtctgtcggtttccgttcaaatacgctactccgtgtgccaatattggaaaacacatgctctccgtccgttaccgtgactgttccccttacaacaacaatgcaacattcataggaaccgagcgtttcttcgtatatagcgtttgcctggatatcgacgagcttaaacgatacatacttaaggggcgccttttctgcctccgtgtcatgaacaagtgtaaccccttgtttaagcacctttgttttcggtttttttagtaactgtcccaccggcatgcctccccctttacaaattagtcaaatgacggcttcggataacgggcggtcacgacttttttgcgcgtataaaagtctacgctatcttttccgtttgcatgaagcgtcccataaaacgacgatttccatcctgaaaaaggaaaaaatgccataggtgcaggaacaccaaggttaatgccaagcattccagcatcaatgttttcacgaaaatagcgaacggccgcagcattcgttgtaaataggcaagctccgtttgcaaattcagaacgattggctatttgaatcccctcatctaaatttttcacacggataatcgaaagcacaggggcgaaaatttcatctttccaaattgtcatatccgttgtcacattttcaaaaatcgtcggcccaataaaataaccatcggcagatactcggcttcggccgtcgcatacaagggtcgccccttcctccactcctttttcaatataagcaatggttcggtttttgttttcttcacgtatgacagggcctaaaaacacaccgtcgtctaaaccattgcccattacgagcgattcagcttttgcctttaatttggctacaaacgcatcggcaattccttcctcaactgttacaacagcacaggccatgcaccgctccccagcagagccaaaagcagctccggcaatattggtgacggcgtcgtccaaatcggcatcatttaagacaattgtatggttttttgctcctgtcaacgcttgaacgcgttttaagttttcgcttgcttttttataaacatactcgccaacaggcttagagccgacaaacgatatcgcttttatgtcagggtgctctagcatgccattgacgacatcatgggcgccatagacaacattgaagacgccatctggcactccagcttcagtaagtaagtcggcgagtttttcagtcaataatggcgtccgctctgaaggttttaatagaaatgcatttccgagtgcgatcgccattgggaacatccaacatggcaccatcatcggaaaattgaatggcgcgattccgccgacgacgccaatggggtaacgataattgcttgcttctacgtctgtcgcaatcatcggtaatgaatcgcccatcattaagctcggggcacctgcagcaaattcaacattttcaatgccacgctgcacttccccccgtgcttccgtcaagtttttgccgttttcaattgtaatcaaacgcgccaattcttccttatcacgctgcaatagttgctgataattgaataaaatccgtgcacgacgcggcacagcgactttcgaccatttagcaaaagcggtttttgcggcttcaactgcgtactctacatccgcctttgttgaaaggggtacttggcaaatgacttctttagtcgccggattcactacatcttcataaaggcttgtgctgctttcaatccatttaccattaatataatttttgactttacggacctctactgttgtttcgcccatgtgttagcctcctaaagtgagtaaaccgctttcattaccggttactttttgatcatttgttggttatatattaaaaccatatgccataaaaggtcaacatatttccattactttttcaataaatttggttaagtgttggttatttgttgaataactttgaaggctatgctattgtctaggtagataaaaaaaggggttttcacaatgaagctattacgtatacaagaaatggaagcatacattctaaaaaacggctcggcctcccttgatgagctgtgtgaggaatttaatgtatcaaaaaacacgattcgaagagacattaacaaactagtcgaaaacggcgtgatccgcaaagtttatggtggggtcaccgcagtagaaaaaagtttagtctcatttgagaaccgaaaagtgcgaaaccaagcagaaaaaacgagaattgcccgtgaggcagccaacttcatcaaagacgatgacttaatctttatagactcgggcacgaccacaaaatcgattttgtcggcattggacccgaatatctcgattactgtgctgacaaatagcttggatgtcattaatgcggctacaggttttgagcgaatccatttaattgtcatcggcaattcttacaaacacaaaacgcgctcatttgtcggcatcgatgaagctgcgattttgcaaaaatacaacatccacaaggcgtttatgtcggctactggtgtcagcattgcccatggccttaccaatgcagaccaactcgaatatgaaattaaaaagatcgcagccgaaaaagcacgggaggtatttttgcttgccgaccaatcaaaatttggaaaatcaacgctattgacatatgcacccttcaaccgaatcgaccacttaattacatcagctccactcgataaagagtacgaagcctattgccaagaccatcatatcgaagtcgtggtcgctgctgaacaccatgtggcgaactgactagagagaagtttttgtaacgtaaaaaccactctacaaccaaaaggcgcgcagcttgaatttcattcattccaatcgaggtgccgtttaagtagagtggtttttattcatttcacgctgtactattaggtttttatcgctgattccccttattgttcctgttgccgagcgttcttttcttttgccgtatacaccagtacccatgctaccaatgccaaaatggccattacgccaaaggcaagctttagccctgctagcgttccttctacatagtcgatgtcgcttcggttcgcgttaaggctgacaagtgtcgtcaataccgttaaccctagcgctgcgccaaactgcctgatcgtattggcaatcgccgttccgtgtgcaagttctgcttgctttagagcgttcatcgctatcgctgtcgcaggggtcatcgtgaagccaattccaaccataaacgcacaaaaacagacaactagcagaggaatgcccgtttgatctcccataaacataaagacagtgaataccaatactagaattccataaccacttaaaccaagagctctcccgccgaatgagtcaaacagcttgcctgagacaaatgaagtcaacgccaacaagaccgttcccggcaagagaatcatccccgatgagaaagcagaccggccttggacatcttgaataaataacggcaacaacgtttccgttgaaagcagcaaaatcgagattacaaaagacaaaattacaccgtgtacaaacaacggaagtttaaataaacgaagttcaagcatcggcgagtctaaacaaagctgccgccatataaacattgctattgcaaaaaaaccggcactaagaggcacgagtacaatagcagaggaaaacccagcgacgctaatattgcttaaaccgaaaattacgccggagaagccaaccacagtaaggaatagtgacaacaaatcaaatttgacgcttttttgttctgttacgttttgcataaagactgcagcaagaacgaaaatcgcgagggcgaggggcaaaacaagccaaaacaaagagcgccaccctagccaatcaacgatataaccggaaatcggcggaccgatagctggcgccacattaatgacaagtgccataagccccatggcatagcctcttttttcagccgggtaaacgtgcaaaagaatcgtttgcaccagcggtagcatcatgccagccccggtcgcttgaacaacccgtgcacttacaagtaagacaaatgagggcgctatcgctgacaataccgtgccgaccacaaagcatgctaaggcggtcattgtcagcgcccgtgcactgaaacggctcattaaatagcccattgttggaatgagcatcgtcgccatcaacaaaaaggacgtagtcagccattgcacttgcgtcgcatttatggaaaattcatccataatcgtcgggaaggccgtaattaataaaaattgattaaataaaaataagaacgaagcagccagaacggtgatgaccatcattttcttgcgccaatgggaatttgtcgtttcattcatttcttgctaaacctcctaccgatgaagtggttcaacatctattcactctacggtggttttgttgaaaatgcaacaaaaacaaaggaagggaatacacgtgtacaaagcacttaaggaaacatcctatgaggggttagcatgtgaaaaaagacagctcgacagccttaactcgcagctgacaaaagcaattgacaaataccgcttcacttgctattatcaattatgaatgacattcagtcattaaaggatgtgtacaagtggataaaaaagaacgcattgttgaagcagcgattgttgcctttaaagaaaaaggcgtcgaaaaaacgacgattactgacattgtgaaacgggctgggattgcccaagggacttattatttgtactttccttctaaactggcggtcatgcctagcattgccgaagtgttcgtcaataagctgattgatcggcttcataagtccgtccgcagtgactcgattgaaaggcaaattgaggaagtcgttgaggccattttctcgattacggaagagcataatgaactggccattttaatttactccggcttgactcaaacggagtatgtcaaggagtgggaaatgatttatgcaccattatacgactggtttgacggcatgctagcccgcgcccttgacaggaaagccattcgcgagacaatcaatactgcctataccgccaaaattatggtcggtgcgattgaatcaacagcagagcagctttatttgtacgaccaacatgatcaagcgagtgcacaagcacataaaaatgaactcatttcatttattagccatgcattaggagcaagcggcctgcactaaggcgcttgcctttcttcggttgcaaaaatgaatgaatgtcattcactaatttaaaaggagtttgttcacaatgaaaaacggttggttctatgtcggcttaacttgcctatttgaacttttttgggtatttggctttaatgttgcaactgtttggtggcattgggcaatcattgtcgctattattcttatcgattttcattttctttctaaggcatgtgaaacgctcccgactggaacagtctatgctgtatttgctgccatcggcacagtcgggactgccctaatggatatttttatatttggtggcgcctttagtatcgccaaagggttgtttatggcacttcttgttatcggcgtggttttattaaaattggccgacaaccatacagacgaaacgaaatccaatcagaaaggagcggcttgacgatgggatggttctttgttgtgttggcagcactgtttgaagttgtcggcgtgattggtttaaaaaaatacagccaacagaaaacagtgctccatacgatcttgtttctcggcggcttcggtgcgtcgtttctgtttttgtacacttcgtttaattatttgcagctaagcattgcttactccgtttggattggacttggaacggttgctgctgttttggtaaacatgatgttctttggagaatcaaggaattggctgcgcttgtttagcttagccatcattgtcataggtgttactggcttaaaagccatttcctaatcttgtttaaacgtttgattaaatcaaaatgaaagaaaatgcttgttgacgaggtaaacgatacgaggttgtttgcctacaacctaagacggcttgccttgcaatgccgtctttttttgctgttcgatatttacttgatgaaaaaatctgtatacgctataaagacgacatccattttttaaggagaaaccaaaaaccatgtttgaaataaatctcccatcaaaaatatcgggaaaccgcctgctccttcctgaaatcaatgtagcagtccaacctgggcaacctgttgcgattcaaggagaagccgagtttttgcaaacgttcttgtcccagtttatgaatccatttactggctcaaccaaccagtttagattagaaggcaagccttttgatcctcattctaacgcctttatgtttcaccaatccgatggcttgtataagcgcttaacgccacgggaagtgatccgcttttggctgaagctctacaaaagcgaagaaaatgacaaacgtcttttagcagtatgcgaattgagtgaggtagccgacaaacgggtccgttcgctccctttgtctgaaaggaggcgtttgcatttttgccgctgcctgatcatgccaagccaagtatgcgtattcgaccagcccactttgcacgtcgatcgccaaaccaagcatgtatttcatacaattttggacatgctatccgacaaatgcatggtcatcaccactacatctctagaagaagcaatccagctagggactgcgtttcgcatgacggagcacagcttctatcaagtcgaacagacaagccatgaacaggatgtcagcgaagcacctaaaggcgacaccccgctgaaactagcaaaaatttcagctaaaatggacgataaaatcattctgttcgacccgttggagatcgattatatggaaagccaagatgggcaaacgatcttgcatgtaaatagtgaaaccttttttacttctatccccttaaaagacttggaacagcgtttagctccttttggctttttccgctgtcatcgatcttatttagtgaatttacagcgtgtgcgcgaaatcattgtctggagcaaaaacagctacagcctcagtttggatgatcaaacaacaaacacgattccattgtcgaaaggcaattatgccgcattaaaagaactgctgcaaatgtagggaggacaaaatgaacgttgattcgtttaaagcgttgctttacaaagatataaaggacttgcgttataatggccaactgcttgtgcttatcttttttccattgatgtttgtcatagctttttttctccttcaaagtaacgtgccgttaaatatcttgctcatgattacgttgttgctgcttcctatccatattcaagggaatttgcttgctgaagagaaagaacaacgtacttggcgtgtattaaaacaaatgggaattcatttttaccacttaacgattgcaaaagcgttcatcaccatatccgtcacattgctgacaatcgtggtcaccactttgctccaagggcaaaccatcttcaatactgcaatggcaagcctttttacagttccctgtatcgtcattatgatttgtgctgggacattgcttggtacttatgcgaacaacaccgttgaagtaaatttatttgggacaccaatcgtcatcttttttattgccctggaaataatcacccgtttcctgtcgaacatagggctacattcccttgccaacttgatgccaaacattcttttcattagcggaattgatttgattgaatctggccaaattggagctgcatttacttcttacttcttgttattagtcatatgggccgttgtggccgttatagcaacccgtttactcataaagcgaaaggcctttacagtgtgaacctttccataaagtagtaaggcactacatgtttgctccattcatgctggctatagctacattcaccatgatttcccctcttttcacccttgttttaaggcatgtgtatccccattccgatacaatgagcgaagaaacaatcacttaaaaaaggggaaatgacaatgttgcaagatctaatgaaatttattatcgaggcagacaccatatatcaatatataggcgtttttattgtgtcgttaattcctttttttgaatcgtatgtggccattccgattggcattgtattaaactttccggttattcccgttgtccttctctcgatcgctggaaacctcctatctgtgtatgtctttatttggctagttgataaactgcgcagaacaaagaaaagcacgaaaaacgaggggagtagacgaaaaagagcgctacgtttctttcaacgttacggagttccaggcgtctcctttgctggaccgataatttgcttccatgttggtgctgcgattgccctcggagctggcacaagcaggcagtacgtcacactttggcaaacgatcgccattgttgtatggtcggtcgcacttggcatcgccttcgcctttggcgtcaatttatttgactatttcccgagcctgaacgtcttttcataaaagaagtttcttttgtttttcgttattttttggccaagcgccttttgtagaatggtctataaaggcgctccggctaatgtttttagttgtttgtgtttatttcccccacttgaccaaccttttttgacgtaattaattgacgcttctctaccatataggcatgtatacataagataaatgtgattatgcttgcaaaaacaaccaatacgattactccacttataaagtcaatgcggccattgttaaatagctcagctaaaaaaccagtagcaacgtctccaccaagaaagtatgtgaaggggcttaagtgtaggaatgggtgcaaagagcttataaattcatgtgtcataggaaaaccaactgtaatcagaatagcaatcatcaaagtcgccatcttgttttttgttaaaacagcagcgaaggctacgatcagaaccaaattaaaaatagcaagcacttgaaggataaatgtcttcatcatgacattccataaaggcattgtttcaaagattgggctcccattattaacaataggatagtggaaagaaccagttccattaaaaatacttgctaagaaaaaactgaaaaccagaataacgaaatagaatgcgacagtcactccagccataaacgataatttcttcattaacaggctcgtaaactttttagggagtaaaacgtcaatgtttatcccccctctgaatgaacgaaaaaatgcctctgacagaataagtgatgcgatcaacataaataatgtcgggaaaaggctttccattactcgatacgtaaacgtcgccccaaatttttcaaaatgcaatgtatctggttctgcgtttaattcaattaagcgattattcacattgcgtgtcatcataaactgatcaatcgcttcttctggaaataattctccattcgtctctttatgtatatccaaatttcgatcgatcattttgttaaaatagactaaggcctctgagaaatcgttttgatcaatagcctctaaaatatgttgaccccaagagatgttttcttcgacctcgattatagcttcttcaaacatgatccggttctcttccgagatatgaggattttctaattcttcctgatagaatgcaagcgtttcttgatcatgatgtaagtaactttgcatgtctgctctaaaatcacttccgtcgattgcatttacgatatagagaccaactacccctaaaaaaagaatcgttgtcgctacgattacagccttgcttcggtagatttgtttaaacaataagtaacgatagctcatcgattttctcctttttgacttgcctctctcataactaaagagccgttgcctaactcataaatgtaatcacaaactttataaatacgatcatcttgatgtgatgagaagagaattgctttattcttgcctttctctcgtgctaacaacttttcaaacttttcaatgctatttgtatctaatccaattgtcggttcgtccattaaccagtattctgcgccactaacctcatacagacctaataatacccgctgtttcatgccaagcgaatactttttgatagggattttaatatattgattcatttcccaataatctaccacatcatctatacatgcatttttattagaccattctctttgaatgaatgttaaataatcaaagcctgtcaagttaggatcaaaccattctgaactttcatagtaaaacagtttccgttttaattctggcaaagaatagatttcatgattagaaatgtaataaatcgatccttttgtttcgctgcggattcctgctattgtccgcaacaatgtcgtctttccagaaccatttcgtgctgataacccataaataaaacctcttttcagctcagcattgccattatagagaagtttttctctagtcactaaatctaaatcctctatctttatcatttttctcactccatctccttagacaattacgcatcaaaattgcctctagaacgactaagctttatttatcccttcaaatacaaatttcctttaatttatatagaactccagaataatgttatcacagaacgtttgaacttgttctaaaaatctataaaaaaacgaaagtgcacatcgatttttagggtaatgaacaaacacattcttatctatcgaaaaaggagccccctcatggagctcctcctttttactcgtttgcagagtgaatgctttgctctgcagctggacgctttattgctttgtctgcttgactggcatttttcattgcttccgctcgattttctttcatctcagcaacagtcttcgttttcaggcgggctgcgccgctcgtgtcctttgtcgctagccgttgctgcgtttgttgcctttgtttggcttcggcaatgcttgttttatattggggcagccatttttcttgggcaatgagcatgtcgtcgacaagctgccaaatttcaggtggggtgcatacggccccagtgagtgggtccatcataaatgcttgccgcaagagctggtcatctccagctacggctgcctctaccgcaaggcgttggacattaatgctcacgttgcaaacggcggcgcaaccaatgggcaagtcacctatgacgggcatattgatgccgtttctatcgacgtagccaggggcttcaataatgcaatcagagggcaaattggagatgacgttttggttgaccacattaaaatgccctctgtagatacgccctgtttctaacgcttcaacaatataggaaccatgttcttggccgcgctcgctttcagcaaaaacgaaagccggctcgttcatccaattaggaaagtcttctttaaaccagttgcgcccttctttgcaaacgcgcaaatagccgccggtttcgccgttaatccacgtgccgaggtcaatccaatcgccaatttcctcttgccgttttcggtaccaaggtacatattcgcttaaatggccgtttgattctgtgctgtaatagccaaaacgcttgagcatatcgatgcgtactttttctgttttgctgtattcagggtggttttcaaacgcttcaagcaacttgcccgttaaatcttcgccgtcatgtttgatttgaatgtaccaggtttggtgattgataccggcgcagacaatgtcgacttcttctggctgaagcccaaacacgtcggcaatttggcgatggccgccttgaacgccgtggcatagcccaactgtgttgacaccgccgtagtggttgcacgcccatgtgagcatcgccattggattggcgtaatttaataggaggcagtcttgttcagcaacgtcacggatgtcttcgcaaatggcgagcatttcgttgatgcctcgttggccgtacataatccctcctgctgaaagggtatcgcctacacattggtcgaccccgtaacggagcggaatatcgatgtcttgctcaaatgcttcgagtccaccaacacggacaacgttaaaaatataacgcgcccctgttaacgcttctctccggtcaagggtggcgtggatttgaataggaaggccgttttcattaatatcacgttggcataactgtgtcaccatgtgcaaattttcctgattgatgtctgtgaaagcgacttcgattgtggaaaaggcaggaacagacagcaaatcccgcaataacatgcgggtaaagccgatgctgcctgcgccaataaaggcaactttaaatggcatttgtttcatcctttctttaataagtgaccttgttatccacggcgcttattgacgacgtcgaatgcgacagcagccaatagcacaagccctttaatagcctgttgccaatcgatgccaagtccgagaatcgacataccgttgttcatcacacccatgacgaggccgccgacgacagcgccaatgatcgtcccgacgccgccataagcagaagcaccgccaataaaggcagccgctatcgcatcgagttcgaataaattccctgcccgtggggtggcagcatttagcctagcggcaaaaatgaggcctgacagcgctgcaagtatccccatgttgacaaacacagcaaacgtcacccgttttgttttaatcccagacaatgcggcggctttttcattcccgccaaccgcataaatgtgacggccaaacaccgtttttttcgtgacgaaggcgtaaaaggcaattaaggcgacaagcaagataagaatgtttggaatgccgcggtaactggctaatacaaaggtaaacactagaataactgctgcgattgctactaatttaacggtaaaccaggccggagtaacaactggcaaatcatgatgaagttgtttctttctccccttaatttggatcgcgatcaaaacagctgttagcacgactccaaggaacatcgaaaaaagatgaatcgactcgccattaaacaaatcaggcaaaaaccctgagcttagttgttgaaaagttggcggataggaagcaatggactgcccttcaagcatgattaacgtaattcctctaaaaatgagcatgcctgctaatgtcacaatgaaggcaggaatttgtacatatgcgacccaaaacccttgccaagcgccaacgagagcgccggcgatgaggcagatgagaacagctaacactgggtggacatttaactcaatcattaaaatcgctgacagcgcaccgataaaagcagcgacagagccaacggataaatcaatatggcctgtaatgataatcatgaccattccaatcgccaaaattaaaatatagctgttttgtaaaatgatatttgtaatatttaacggctgcagcaaaatgccatctgttaacagctggaataaaagcataataaacagcaacgcacaagtcatgctatattggcgcatgttgttttggacaatattaagaaatgctttcatggtgatcctccatttccattgtcattcgcctcatcagacgctcttgggaaaggtctttcttttctagttctcctgtgatgcgccctttattcattgtataaacacggtcggccatgccaagtagttctggcagttcagaagaaatcaatagaattgcttttcctttagcagcaagctcgcgaatgagcgtataaatctcatattttgcgccgacgtcaattccacgcgtcggttcgtctaagattaatacatcggggtcggataaaatccatttgcttaacacaactttttgttggttgccgccactgagcttgcctgtttcttgcaaaatggaatgcgctttaatttgcaatttcttcataaacgattctgctacttgtgtctctttcatttgatcgatgatttgatttttggagacggcaggcaagttggccagtgtgatgttttcttttatatcattcatcaacacgagcccataggattttcggtcttcggtcgcgtaggcgaggccgtgatcgattgctgcccgtacagaagggatcgagatggctttgccatcttttttgatcgtgcccgttatgtttgtgccatacgatctgccaaataaactcatcgccagttctgtgcgaccggcgcccattaagccagcaatgccaacaatctcgccttttttcacgtgcaaattgacatcatggatgatttgccgatccctttgcactggatgaaacacattccaattttcgattgaaaacacgatatcgccgatctcactttgcccttctggatagcggtttgttaaatccctgccgaccatccctcgaatgatgcggtcttcgctcacatcttccgtatgcaaatcaagtgtttcaattgttttgccatcccgtaagatcgtaaccgaatcagcaattgccttaatttcattcaacttatgggaaatgataatagacgtcacgccttgttcctttaattccgctaacagcttgagcaagttttcgctgtcgctttcgtttagtgaagccgtcggttcatctaatatgagcaattttacgtttttagcgagcgctttggcgatttccaccagttgttgtttgccaacaccgatatgtttaatcagcgtctggggtgattctgccaatttcacttttttaaggagttcttgcgctttcgttgcggtttcggcccaatcgataatgccgcgttgtttttgttcatttcctaaaaagatattttcggcgatgctaagctctgggatgagagcaagttcttgatgaatgatgacaattcgtttctcttcgctttgtttcaagtctttaaaacggcaaacatcgccttcaaacaaaatgtccccttcgtacgtaccgtatccgtaaacaccgcttagcactttcattaacgtcgactttcctgcgccattttccccgcaaagcgcatggatttcgcctcgtttcactttcaaattgacattgcttaatgcctttacaccagaaaacgtcttggtaatgtttttcatttccagcaaaatatcggccatttgcttcacctcttttttagagcaagcggctattagcaagccgctgttattgatcaagctgtgacgcctcatagtagccgctgtcaaccagcacttcctcgtagttgtcttgatctacaacgacgggctcttctaagaatgcaggaacgactttcgcattattgtcgtacgtgtttgtgtcattgacttccggttcttccccttgaagcacagcttcggtcatctctaccgcctttttagcaagcagccgcgtatctttaaagacagtcattgcctgttcccctttgatgacagcattgactgctggaagatctgcatcttgtcccgttataatcggcatagtatcgacggtatagcccgaattttttaaagaggcgataatgccgatgcttaacaagtcagctggcgctaaaaccgcatggagctcttcaccccctccataattagagctgagcaaattgtccatcctgctttgcgctttggcgccgtcccagcctagaatggcaatctggttgaaatccgtctgcccacttgggaccactagcttgccttgatcgatataaggctgaagaacagacattgcccctttaaaaaagaacgtcgcattgttgtcatctggagaacctgcgaataactcaatattaaaaggcccctcttcttcttcgagatctaaagcttctacaatgtactctccttggagcacgccgactttataattatcaaacgtggcatagtaatcgacgtactcagaattcatgattaagcggtcatacgaaatcactgggatgttttcagcattggcgctttcgagtacacttgttagcgtttctccgtcaatggaagcaatgacaagggcatcgacgcctcgagtgatcatattttcaatttgtgagaattggttttcgacaatatcttccgcatattgcaaatcggtgtcgtaccctaactcctcaaagtaggcaaccatttggttgccatccgcaatccaacgttcagacgactgggtcggcatcgcgattccgatcgttcctttgctgccttcctctccagagctttgctggatgcagccagctgtcatgaaaagaaggctggctacagcgccaaatctaattgctttttgcatgacgtgcctcctacgcaatttgataacgctttcaatgtaatggagcttgtttctcaaaatgcatatgcctttggcttgcttttcatacgcctttattccgctgatgaaaaagcaagaagccgtacctttgtcagccccttacctttctatgatggttgcttaataagcgcgccggttccaaaaaagttcctttctcacctggccaacatttgactgatcatcgataacgatacattcgatccccataaggctagcccaatcagccaattgttctttggaaatctcataagaaaacacggtatgatgggcaccaccagcataaatccatgcttctgtcgcttccgaaaaagaaggcagaggcttccacagcacgcttgctaccggcagcttcggcatgtcatgtgggttttcaactgcttcgacctcattggcgactaagcgaaagcgggagcccatatcaataagggctgcatttaatgcacggcctgctttgcctttgaatacaagccgcgctgggtcctccctattccccattgacagcggagcaactacaatttctggtttttgggcactgattgtcggacagacttcgagcatgtgggagcctaaaatcatttcctgcccaggttccaaatggtttgtataatcttccatgaaggatgtccctacgttgcctgccagcacttttagcacacgcaataaggcagctgttttccaatcgccttctccagcaaacccgtacccttttgccatgagacgttgcacggctaggccaggcagttgcttcatgccatgcaagtcttcaaacgtagtcgaaaaagcgcggaaatcgccttgctgcaaaaaccgctcgatccctatctcgattcgagcttgctcttcaacggctgctatatttgcgtctcgatgaaacgtataaaggctccggtactcatccattagcgcattgacctcttctgtcgatacgctattgatgacttcaactaaatcgccaatgccaaaaccagacacagaccagccaagcttgatttgcgcttcgactttatccccttctgtcaccgctacttcgcgcatattgtctccaaaacgagcgattttcagctgtttgctctcttgataggcattgaccgttttcatccagtcgcctatccgtttcataacgcgggcatcttgccaatggcctgctacaactttccggtcaatgttcattcttgataccataaagccaaattcacgatccccatgggctgactggttcaaattcataaaatccatgtcaatgtcgccccacggaatgtcgcggttatattgagtatgaaagtggagcattggcttgtttaactcgtttagtccagcgatccacatttttgctggcgaaaatgtatgcatccatgtaatgatgccagcacagttgttgtcgccattggctgcgcgaaacaactcaagtatacgctcaggcgaggaagccactggcttgagaacaagctcctctggcaacttttccttaaggcgctccaccatcgctttggaatgagctgctacttcatccagagcttcctgtccatagagcggttggcttccagttataaaccaaaattggtattttccttgtttatgcatgcacggctcctccttttgctctgctacgcaactgcttgagtgttttcatcacatcgttttcgcccctgccaaagtagtcatggagtttgctatattcctcgtatagagcctgatataaacggacattttcatgatttggtttaaaggagcgcgctttcgtgtgtgccattttttcggcggcagcgaatatcgtctcatacccgccagcttcatcgcctgcagcaacacttgcatacatggcggccccaagagcaggcgtttgttttgaagcagccactttgatttcaagatttgtgacatcggcgtaaatttgcatgagcaactcgtttttttgtggcagccctccacacgcatatagaacgttcacctctacgccgctgtccctgaaagcgtcaataatctttttcgtgccaaatgcggtcgcttccagcaatgtccgatacaattcttctgcttttgtttgcaaggtgtatcctaaaataagccctgtcaaatttgcatcgacaagcgttgaacggtttccgttccaccaatcaagagcgagcaaaccggtttcgccaggacggtaagcggccgccttttcttctagcaacgaatgaagtggttttcctgcttgttccgcttcttgcttcaagtcagcgggaatgccatgtttcatcagccatgcaaatatatcgccaactgcagactgccctgcctcatagccaaagtatcctggcacaatgccgtcttctactacgccgcacatcccttcgacttctctttcctctttagctaagacaagatggcaaatcgatgtgcccatgaccataaccattttccctggtgtgacaacgcctgctgctgggacggccacatgagcatcgacattccctaccgcaacagccgttccaggcttaaggccaagcgtctccgccatttctgctgttaatccaccggcacgttggcctggggcaaggatatcaccgcggagtttcgtcgttgtcagctgggcaaggcctggatctagcgcggcaaaaaaggagtcgtctggatagccgtcgcgtttatgccacatcgccttataccctgctgtacaactgttgcgtacaattgtgccagtgagctgtgctaccacccaatccgttgcttctaagaaagcatctgctttctcgaacatatcggggtcttcattaaaaatttgccaaattttcgacaccatccactcggatgaatatttgcctccgtaccgagctaaaaagacctcttttcgttcctcagcaatgcggttgatttcatcggcctcatcttgggcggcatggtgcttccacaacttcacccaactgtggggcctgcccgcgagttgggggtcgaaacataggggatccccatgcttgtcaatcggaagcatggtacaggcggtaaagtcaatgccaatgccaatcacttgagaagcgcttatgtctgcgatttctacaacctttggcaccgataaacgcagcacatctaaatagtcgccaggatgttgcaatgcccactctggctctagcgaacgcctgctgtctggcaagcattgatcgataacgccatgtgcgtaaggggttacatgttcagccacttcggcgccattttctaaatcaaccaagactgccctccccgactcagtcccataatcaattccaatcgtgtagcgcttcatccttttgtatctcccctttcctgcccgtaataagcatgttctccgtgctttcgcaaataatggcgatcaagaagctgttgcgaaatgcgttcggcatttgcgttaagcccgattgtatgagctgccatttgcgccacctcttcgagcacaaccgcgtggtagaccgcttctttcggcgagcgcccccatgtaaacggggcatggccgtggacgagaacagctggtgtctcaagtgggtcttgaagacggaatgtctcggcaatcacatggcccgtctctttctcataagcgccattgatttcttctggcgtcattttccgcgtacatggcacttccccgtaaaaatagtccgcatgagtggtcccaaagggaggaagggacatgcccgcctgtgcccaacttgttgcccaccgagaatgggtgtggacaatcccttgtatatctggaaaggttcgatatagaacgagatgtgtctcaagatccgatgaggggttgagcttcccttcaacaagttcaccatcaagggtaacgacaacgatatcttctacatgcatctcgtcgtagtctaatccgcttggtttaatggcaacaaggttgttttcacggtcaatgccactggcatttccccacgtgaatgtgacaagcccgtgtttcggcaaactttgatttgcttcccatacgtggcgcttaagaacgtccaacatgagtttcaccttcttttttcattgttgtgccttcacgataaagacgcaaaagcgtataacggtctctcagcaaataggcgtgctgtaagctttcctcaacaagttctggagcaatcggtacgagagcttcgttccaccctgcttgctcaagcagcgcttttacatcgtcagggtctggcaatgcttgaacaagagcaatcacttgcttcgcttcatcgtcgcccaaaaaccgatgtacgtctggaagcacagtgttcttataaaagcggttgatgatttgcgtcgataagccaacttttgcgccgtgcagcaactgctttttccctagtctaagcgcttccatttcccagtaatgggaaagatggtgctcggcacctgaagccggatgggaataaccaaacaaggccatcgctaaaccggatgtaagcaggctttccatcagtacctgcacgcccgcagacgtcctcttgccaatgtctgcgactttatcgacacaagcagaaagagcctcctctgttaaatcagctaccaactcggaataggcctcactttttagaagagagccaattttccaatcgaataatgacgtatacttgccgaccatatcgccaaatccagcagcaatcaaagcaggaggtgcgtgttgcaaaacaaccgtgtcggcaaataaagcgattggcgcgacaagttgatatgtttttttcgagccttgcacgacaatcggcgcaccgagagaagtgaagccatccacagatggggcagtcggtatcgacacaaacggtttgttcgttttgccacttacaaagcggacgatgtcatgaatcgttcccgcgccgacagcgacaagcaacttcgtcgattgctctacttttagcatgacgctaataagggacacttcgtcggcgatgatatcgccattgctgtttggttctaacagatgccagtctgcttttacgcctttttggcataagtggtcgtgcaaatcgcgtcctgcggctttgtacgtatgggaatcagcaacaaggacaacgcctgattcggcttgcttggctatgaaagcagccgcttcgcgcaaagccccttccgccacgacaatttgctcgagtggcaaaggatacaaatcctcttttgaggcgcgaatccgtgcttttaatgctgagatattcataagtacccccttaagtcatcaatgctatttaaaacgtaatccggctgtcgctttggcggaagcagctccactgcttctttacgggtattacctgttagcacaagggcggttttcattccttgcattcgcccaagcccgatatccgattcaaggctgtcgccgacgatcaagcatttttctgctggcgcctgcacataagttagggctgcctccgccataaagcaagagggcttgccaatgacaagctcggttttgcgccctgtcgccgcttcaatggcgccgataaatccggcaacatcaatagcttggcctgcttcgtctggataggttttgtcggcattggtggcgatcattcgggcgcccgcggaacttgctttaaaagcagcattcaactcttcgtacgtaatcttatcgtgaagcgtcacaacgacaaagtcagcctcctctggcgtctgggcgattttaacccctgtatacagcaattcttgggcaagccctcgattcccaagtggccagactgcagctttcggataatgttgctttaaaaaggaggcagttacagttgaagacagtatcaatgattcaggggctgccataatcccatggcgctccagcttctcaagcccttccttcctagatacattgccgcggttgcttaaataggcaattcgcttgtcagcttcttgtaaggaagcaatcgtctcttttgcgcctcgtatgaggcggtcgccttgaaaaacggttccatctaaatcaaggagcactgcttccgtgtctgctagcatatgaaatcctcaccttcgcctttttcctttatctatttttattacttcgcctcccttacctcagcattctaaaacctgtggttgtcggcaaatattgatttaatcttaacgtggcccataattaaagcgcttccaataaagtcacttatgcttctgccgattgtataatatcctcactttttcttcttaaattgtcattatattgatgccttttacggtactcgcttggtgtgcactttacatgttttttaaaggtcgtgctgaagtattgctgggagttcataccgatataatgggggatgtccgtaatgctaatatccgtctgctttagcatcgcttttgccttattgattcgataagaaatgaggaattcatgaatcgacttgccggtgaacgctttaaatacacgctgcaaatacccaggatgcaaatggacagaattggcaatatcagcgacgctcacttcgcggtcataattttggtggatgtaagcgagggcccgtttcacataagcctgctggtccggctcggccactttcgcttcagccaattctgctatccgaattaaatattcgcttaaaagcagctgaaccataaaatcagtttgttcgctttttttgtccacttctaaaattaatcttcgtaaacattggtacgtatcgtcggtgtcatgcaaaagcaactgcgatgcttgcttgttaaccatgttccctaatgctcggttctctttgcataatttataaaaaggcggaaatgccgtgcagccttgctcaaaggaaaactcaacattaaacatccggcaacgttcgctaacgattaagcggtgccgtgtaccggcatccaagaaaataatttgtcctttttttaactggtagctcccttcatcggtttcaactttgcagctgcctgagagaacatgcatgcattcagctgcttcatgtgaatggaatttcatttcaaactggcgccattctttgtaataataaaactttacgacagggtagtaaggttccttttgcaacttagggtcaaatacactcattcgtatttctcctttgcctgtgtaggggacactcccctacacattcggtctcattcgtaatacaagcgaaaaacaatatcctggtcataattgccaaacgaagagccaaacagtgtcacgccgccaatatggacgccttcttcgcctacagctacccggaatgtccatactttttcccttattgagacatcagccaatttaacgtctgatagctgcttgccgtcaataaacgtaccagcttctgtaatccgaatgactttaagaaggccatattggttgatgccccgtggccaccaagcaggtgtgtacttccctttttgatcgccaaaatcaccggggctgcgccaatagccaaggcttactccgttaaaggtaaacgacacatcagagggccaattgtcgtttgtaaaaggggcttctgatgataattccattgaaatctccaattcctttggcgtttcgcccccatgaataaaattggaaagtttatactcaacaaaccctttataaaaccaaaggattctcgcgttcacacgcatcgggtcaagaaaataacgaggctcatcaaattcgcctacaattgtttctggcgtggccaagccacatgtaggttctacataaaagtcagtgaaatggccaacagacacatggctctcatgaaaagcgcgagtcgggccgttttccttattaggaaaagcgatctgggcgtgtcttactcggagcgaacacattttttgcacgcctgccttgccccttacatgcgtcgtgtcgatgagcccggccttttctaatttctgcacatgttttgtcataatcgcgctacttacttgctgcgactcggccagttccttaatgttcatagaccgctccgccaacaactgtaggacatttaaacgaatccggcttgccaatgcttcataaaccggcaaagactgttttgttaagtctaaatctagttccatcgcgccacctatttttttccgttcatactcgaaccgatttcctccatttaagaaacggcctttaagcaggagaaaccaactctctcaccagtataatgaactcgctttctacctacaagtccgtgaagacgccacacttgccttgtataagccctgctagactgaaaacgaaccgatcatcgagctggatgaggcaacagcctcgcccgctggaatgcttttaggctaaaatgggtggtaatccaagcgaataagcttccagcaaaacaaaatccagcaggaggcaccaacacgaacaataaagcagctagacagaggaagaccgacatgaacactgcataccgtatcgaagcaatcgccaagagggcaacattctttaaaaatgggatgagcgccccgtcaaatacgactaatgccgggccaataaacaaggcgcctaacccatatacgaacaaacagagcatcaacaacgctgcagccgctgccgctcctggaaaatcgagattgaagacaattaaatagtcaaccaccagtatggcgcctacaagggcaacagtaaaaccaacaatgttcgcccgccaaaacgcgcctttccattcttgaaaaaatgtccttactagcggaacatcgccctctttcaaacaccatcttttcataaccgcaaacatcgcgtacattgcgggaaaaaaaccgacaatcactcctcctaacaagcagaacacaagccataagctgtttaaagccgctaagcgtaccaaccaatcacaaagacggagtgcataaccgcgaaggccactttcatccattagcccatcctcctttttataagtcttatggctgcgagccattatcccttaatgcctgaaaagctgacgcctttgacaatctgtttctcaaacaagagaaaagcaataatgacagggattgaagcaatcgcgttgacggtcatcggcaaaatgtacgtctctgaataattagaattaaacatcggaatgccaacaggcaatgtatagagcgattcggaaataatcgctagaaatggccataggaaattgttccatgagcctataaacgtcaatatgccgacagcagcaactgctgatttgccaagagggagcacaacgttccaatacaaacggaaatcattgcagccatcaagttttgcgctttcaattaattcattcggcacgccgtcaaaaaagctttttaatatgatgacgcctaaaggggcggcaatcccaggcaagataagccctgcatacgtgtcaagcagccccattgagccaataatttcatagagcgggataatcatcgcttcacctggcaccatcaaaccggctaaaaagaacaaataaagcgctttgcgataacgaaaacgcattttcgagaaggcaaatgccgccatagacgtcaaaaggagcgtgagtatggttgtcagaaacccaacaataaaactgttccaaatccataaaaacacatcgctgccgaggataatgtcgacatagttgccaattgtatacggaggggcaaaccagtctaacggcgatgaagcagccgtcccttctggttttaaggaaacaaagaacatccaaataattggaaataaaaacaacagcgccgatataaaagcaacagccacttttacaggacgaaacggatcgcgtttattttcaagactcgtttgactcataaaagccgtccctccttgccgcctaaacggagctgaatgaccgataagacgaggagcaccataaacagcaaatacgacatagccgctgcatagccaaggtcatagcgttcaaagcccatttcgtaaatgtacaaaatgatcggccgtgttgacgttcctggaccgccatccgttatcaacaatatttgcgcaaacactttgaatgaagcaaggatttgcaagagaaaaatcaatctcgaaatcggcaatagttgcggcaatgtgatgcgccaaaacatttgttgccttgtcgctccgtcgacttcggctgcttcatagagctcatcggggatcccttgcaacgccgtcaagtagagaatcatattaaagccgactgtccaccaaagagtcacagcaataatgctgacccaggcaagagatggtgtcgccaaccaaaatggctctttatctagcccaaacgcttgtaaaatgttattgacgacccctgtataaggctgcagcataaaaatagcgacaaacgaaatgaccgatacacttaaaatgcttggaagaaagaaagatcccctaaaaaacgttttaagcttcgtatttaagttggccattagcgcaagcaccaacgctagaataaccattgtcggcgtagacaagacaacaaacaatgtcgtgttgccaaatgcttcccaaaaattagggtccttcagtacattggcgtaatgggcaagcccgacaaaatcttgttgttcaattaatgtccagttaaaaaggctcatttgcattcctttaaaaatcgggtaaaccgtaaacagtacgtatgctacaaaaaaagcaattaaaaatggaacagggcgcaagtcgtctcgccatgtcaactttttcacttatttcccctccttcatatgagtcagaattattggcgcgtggtgacacgtaatgcatcgatcatctgatcaatgccttcttcaggggtcaggcgattgctcataatttcatcaagcgcccgcaccatatccgtctcagcagggttttggtaaattgtcttatcggtaaaaacgacttttgatgcgacttcagcatattcagagcgaaaaggctgttgttggaacgccggcgaagcgacaacgtccgttctagccgggatatggcctgctttcgcccaatcggcgccacgatcgctaacataagcaatgaattcggcaattgcttgttgtctctctgctgtttgctcctctttgatcgggatgatcaacgtatgggagtctccttgtgcggcttcgacttcaaaagattgaggcaatgggacggcggtaaagttcatgtcgctcccttcccaaattccagtcgcccacacgcctgtcattaaaccgacagcatttccagcctgaaacgtttcataaaaatcgccaatgtgcatcgggatcacgtccccgaagaagctatgaatataggtagctgcttcgatcgcaatttcccgatcaagcgtaatttctggttcccgcaagtcatcggaaaaaatcggcgtgcctcccatttgaaaataaaccgtccaccaccagcggtacacatcgaccccgcccgttgaaatggaaagcggcgttttatcaggaagcgcttcttttgcttgttgaaaaaaggctttaaagccttcaggcgactcatctagtttaaggttgccgtcttcatccaacagcccagcttcttccgctaagtcgttgttaatgtaaaggatgaacgggtgtgtatcgattggcactgcataagcagcgtcttccacttcaaccgcttcacggatgttgtctggaaataactcaaaatcaaattcagtctccgccataatcggttcaacaggttctaacaacccttgattcataagttgaggaagcgttgccgcgtgagagacagcaacatctggccctctatcggctgctacgcttgtgaccacttttgtataatagtcatcccaatcttgcaaaatcatatcaatgtacacttcatcttgactattgttatagtcatcgacgattgcttccatatacgacaaatcgccgcctgaaaaaaacacccaataatcgagcttcatcctgccatcaccagttgttcctgttgtctgggcacaggcgccaagaaggagtgccgcgcttgctaagacagcgaacttgccaaaaacatgcttcatattgaccggctcctttctaaaacggcattattccgaaaacgctttcatatttattgtctagaaagccgcctagctgcacgcaagcggccttatgccttactggtgtttcaagcgaattacatgccatgatgctcgaggcaaacgggcttctagtttgccatcctgcaatgtcgactgcccttgatcgtgtggtttaacaggctgatatgcttttgtgttaaccgcttttaaatcattgtgctctagaacggtatgagcaacgatttgataatgttcaaaaccgcgcacgtcgatttcaagatcgaggccatcatgcaaatggcggtttaacgcaaaaatggtcaacgtcttctcctcttcattatggacgacagcgctatcaagctgcggcacgtctgtatacttattcgtatcataggctggcgtctgtacaactggctgaagagaagtgcctcttccgtaaagagaaacatgcataaatgggtaaaaaatcgtttgccgccaagacggcccgcctgtttctgtcatgattggagcgatgacatttacaagttgcgccatacaggcgattttgacgcggtcagctcgccgtaagaaactcattagcatcgaccctactaacagcgcgtcttcaaaattgtagacgtcctcaagctgtggtggcgctaccgtccaaggctcaatcgctttgtctgcttccctggaatggtaccaaacattccattcatcaaaacttaaatacatcgttttcttgctgcgcttttttgcctttatataatcacaagtggcaatcacggtagcaataaaacgatccatttccaacgtctttgctaagtagctagctgagtcgtttgaggtatttccataatattggtgcaatgaaatataatcgacttcatcatacgtataatcaagcgttgtcgcttcccactcgggaaatgtcggcatatcgatgttggaactgccgcacgccaccagttcaatcgtcggatctaccagcttcattgcttttgccgtctctacagcaagcctgccgtattcaacagcagtcttatgaccaatttgccacgggccgtccatttcattgcctaagcaccatgttttgatgcggtgtggttgtttcactccatggctgactcgcaaatcgctataataactaccgcccggatgattgcagtattctactagatttctggcagcgtctggcccccttgtgcctagattaacagccatcattacttctgtgttggcgcgtttggcccactcagcaaattcatttgtgccgactttgtttggttctagcactcgccaagccaattccagctttttcggcctctcttcaattggcccaaccccatcctcccaattgtatccagaaaccatgtttcctccaggataacggactattgggacatttagctcttttacaaggtcaatgacatcttggcgaaccccatcttctccagcatcgtgatgcccaggttcataaataccgccataaacagctctgcctagatgctcaataaaagagccgtaaattcgttcgtcgactttgccaatctgaaatagcggatcaatagacatcttcccttttttcaattgattcatatgcgcctccttgtaagcgattgcaattatagttaataaaaaagttaatcaaaaacatttatattactttacgtgaattatacgcccgccttttccacccgtcaacgcgaaattttaaacagaacgaaacaaagaacccagtactggattctttgttcgtaaacatgcaagcaaacatttccctatttaagccccgttgtcgcaatgccctctaccaaatgtttttggaaaaacaagaagatgataaactgaggcaatagcgataaagtcgacattgccaaaagcggcccccacgacgtgcccccttctgcatccataaagttccggagccctagggagacggtttgaatgtcagcactatttaaataaattagcggagcgagaaagtcatcccacgcccacataaaggcaaaaatggcgaccgtcacaagcgcaggtttaattaaaggcagaatgatccgccaaaaaatcccaaacgtcgagcatccgtcaatgatagctgcctcatctagctcccgtggaatgccgcggataaattggatgagcagaaaaatgaaaaaaggcgtgccccctaaaaaagcgggaacgattagcgggtaaaacgtattgacccagccgatgttatggaacatgatgtattgaggtattaaggtaatttgcacaggcaacatcactgtgccgagcaaacacgcaaataaaatttttttaaagcgaaactgcaggcgtgcaaagccgtaggcgacaatgctcgaagacagaatcgcacctataacagacaaagtcgtaataaaaatagagttagaaaaatagacgtcaaatccagtccgcccaaacccctcccagccttttgcatagttttcccacataaattcgccaggccataatgaagcggcgttgccgaagatctctgtttgcggctttaaagaacttgccaccatccataagattggatacaacatgacaaaaccgaataaaatgacaaacgtataataaatcgcatccgccgttttggttcgcttcttcatttgcttcccccctcataatgcacccaatatttggacgtcgcaaacaaaataagcgtaatcacgccaatgatgacaagcaaaatccacgccattgccgacgcatagcccatccgtaaatgctcaaatgccgtttcatataaatagaccgcgtaaaaattagtcgcatccatcggcccaccatttgtaattaaaaacgcttgtgtaaatgtcataaacgctccaatggtttgcatgattaaattaaagaaaatgaccggcgtcaacatcggcaacgtgattcgaaaaaaacgagtcaatgtagacgcaccatcaacgcttgccgcttcataaagctcctggggaatttgtcgtagccctgccaaaaaaataatgagcggtgaaccaaattgccaaacgacaagcacaattaaaattgatagcgcgtacgaaggatcgccgagccagttgatgccatcaaggccaacggaggcaaatagcgtattgattgcgccttcgcggccaaatagctggcgccacacaacggcaatcgctacactccccccaataatggagggaatgtaataaatcgtcgtaaacagccctgtcccttttcttcctgtattaaagagcagcgccagcaatagggcaaaaatcagttttagaggcgtagagacaaacacgaatataagtgtgacttttaaagactggacaaaacgcgggtcattgaacaacacgtttttgtaattgtcgagccctgtccaaactgcaggcgaaagcatgtcataattggtaaacgaaaaataaagggacgctagcatcggccctatgactaatcctaaaaaaccaattagccacggggaaatgatcaagtaggcaacgaaatcgttttgcagcgatttcattggttttcctttaaaagaaggttgaacggtgctttgcgtaggtctcatcttggcctcctgttccgatgcttactttaagatcgattctgcttgctggcgaaactgttcggctccatcttccggtgtggtttgcccgtattttaacgactccacaacccgcaagaaggcggcacgcacttcactttcaccaggcgggggcagtggatcggctggcgccgagttctcagcgacatattctaagtatgcaaacgttttttcgacttctggcgaaactttcccctcaagatgggaacggatttcagctgaaatcggcacgcctcgctccgcttggaggatttcatttgcctcaggatcatttgttataaagtcaataaacagcgccgcatgttcttcctggttcgtatgctcgctaatggcgaacgacatgcttggccttatccaattgccttctgttcccccctccatctcaggaagcgatttcaaatctaattctgcttccgttaacgcctgctgcccaataatctggttactcgcaatcaacagcatgcttgtcgtgccgtctgcaatcgtcgaatccccgccttggatgtattccatcgttaattcatggggcggcgctgcttcctcttctaccatcccttggataaattgaaaataagaaacgagcgtttcatcagagtagccaagcccgtcgcctgtttcattaaacacactttcgccattctgccttgcataggcgaaaaacaaatcaaattcagtattgttaaagtcgtagccataaaagccatcgccaagtgcgctttttaatttaagcatcgatgctttcatatcttcgtacgtataaccttcgtctagctcaatcccatgttcggcgaacaattcggcattgtaaagcatgccgagtgcattggagccgagtgaaattccatatatggcatcgtcgatcgtattgacatcttggtagacatcatccacattggacaaatcaatcgagccgtcctcgatcaaaggtgctaaatctttcaataaattcctggaaatgtactcgttcattttcgtgtaatccaattggacgacatcgggcaagttgcttcctgctgcttgtgtcgttagccgttcccaatagttgtcccagctcgtgtactctggctctaccgatatatcaggatatttttcttcaaaaagatcgatcacttcaagtgtcattgtatggcgctcctgtccgccccaccaagcaacgcgtaaaacattgtcgccgctggcggtagaacggttgtcttcccctcccgttcccacttggcaacctgccatcgccaacagggccaatgttgagtaaagaaccgtgctccgcttgtttttcacaacaactcctccttttattctgtgctcacgtccttcaacagacgcggctttcgcaaatgcgcggcttatcattttcttatttttagccttgcccccactgttgctcgactgtttcagcatggcgaattagctgttctttcgcttctttcgaaacatggcgttcgttcgccctattatgcaaatggcgcgtatacttgttgataaacaagagcgcttgctccatccgtcctgcttcgttgtggtgctttgcctgcttcagggattgggtaagctggacaacaagtgggccttggacttcgcccgccacgataaacgcttctgtcgctttttccaaaaaggcgaatcggtcttcctcgtgttcattgaacaatggcacatacgcccaatcaatatccgaagcaaagtagaagctcggataagaaggttggttgtaagtgacattttgccaagcaatccccgttcggtattggggatcatgcatcaatgtgtacagttttcggtctgttcgttctgtgttcatataaatacgaatcgcagagctgtcttctgtgcggacgagaagctcttcccgccaatcgccaaatatgtcagcaacaagggacggattgcctttcgttccgttgtttgtccgtgtcccttccgcagtcaacaaacgccctcgttgccaatcatcaatcgtcggtatgtcgtcaagcgcgccattaacaatttgtgtggtcatgtcaggggaccatttaatattcatgtttgtgcctggctgctcggtgcctaaacgcttgcctgacgcactgtataagccgacggcccacgtttccaggccgcgctcgccagggatgacatcgccaaccatgccgcggccagtgtctcggccgctatactctccgtaaaggacatcgcctgtgcgcgcatcgcgtaacgcgaaaccatacggcgcatactgggccccttcaaaaaccataaacgattccaaccctggcctgtctggatcaatatcggcaacatgaagggcatcgccatggcctaatcgagccatttcacctggtgctgcactttcgggaggcaattcagcaaacgagctatacaggagcgttccgtcatcgtcaatcgttgcggccccataaacaatctcgtgtttgccatccccgtcaacatcggcaacacttaatgaatgcgccccttgtgtggtgagggtggcgtattcctcattggttccgtctacgccatggggcgaatcgtgaaatgggttttccatcggtgtccagccgctgtcaacaaaccaactctcgtgcagttgttcgccgtcccaatcataggcgacaagtgttgttcttgtgtaatagcctctcgcaaaaatggcagaaggcttttcaccatccaagtatgcaacccctgctaaaaagcgatcgacacgattgcctggctcaatccggttcatcgcatagtcgccccacataaggccatcgtcttctcgccctggtttataatggattgtttgtaattcctgtcctgtctcgcctgcaaacacggttaaatactcagggccttcaacgataaaaccttcaaaatcccgcaattggttgttcgcacttctcgaaggggcgtattcatcgataaaataatcggctaacgcctccgcatctccgcggcttaaaggatagtcatacaacggttcgatcccgaaagcctcttcaagcgtctctggccaatggccgttttttacttcttcatgttcatgccaaccgataaacatctcgaccagatgggcataataatcatcggcactcatccggtaatcgtcttcatggctgtaccctgcttccacgtcttcctgtggcatcgtaatatacgtttctgattcaactttgccatcctctgtaaaggtgatcacctttgtccctggtgccgttttgaacatcagttccgctttgccgtccccatcaaaatcataaacaagcagttgcgtgtaatgggcgccggaacgaatgtttttgccaatgtctatccggtatagcaactcgccagtcaatgtataggcatcaatataggtgtgtccggtgtagcctttttgcgacacgtctttcgaatttgtcggttcccattttacaaaaaactcatactggccatcgccattgacgtcgccgacgctcatatcattagcatggtacgtgtacgcttctcctgcaggcgttacaccatcctccggcttttgcaacggcaagtcataatagccgttttcccacggctgaactacgtcacttgcctcttccttcccaccattgacagcgcttacataataactagatgatgacgttccttgctcatccaaatagttggtgctgtcggttaccgtttcaagaaattgcccatcacggtaaacgttaaaaactgtgccgaccaatccatggtcagaatagccgaccgcctcttccttcaacagccgccaactcaaaaaaacgccttctcctgtatcaaccgctactaagccacggtcaagcgcttccaattgcacgtcgaactgcttttcaacaggggatttcacagcggaagaacgctttccttcagcgccgtttttgataggagcgactttaaaaaaatggttgacatgagtcgaaccgttaaacacaaatgcctgttcttccgtctcggcgatttcttcatattccatcaaatctgtgtctttatcggcccaatagactttgtaggaatctgcctcttttagcttgttccattccaacgtcacggagtcatccgtcacttccgtgatcacaacatttaagtaatctggttgcccatttgctactgcttgttcgctttttgacaaaggcaaacacaatgcaacacagacaagtgctacagccattttccgaaagcaaacagccatccatcctcctcctttcggtagaaaaaaaccttatttatccattagaataacgaactgctatctatcggtcttattaaatacggttcctcgctctcagtttccgaacttagctttttggggcgcaaaaaaagacagtggtcatgctaagccactatctgattgtgatacactaagctttattaaagaagattcaagaaaaagctttattcaaaacagacaaaggtaacctataaaatgtagacagaagtataagagcaaaaaagaacgaagcattcccattttaggtgaaaaaaattaaagtagtgatgggattgacggaaaattagaggaaagcttaaaaaatgatatagagggttactttaacataaacttgaagtcctttattaacccatatatggttatgaacgacgaggattattaaaggtagggactaatgtgtcaggaattggttgaaatgcaagggggatcggcagatggtacgaatcatccacctgagccgctaactcaagggtggatgattttttgtggttgtgaaacgacatccatgcaacgatcagaagcccaactcaacatgaatgaccttatagagtatctagagaatggtttgctgacgttcgtaaaatccaggtaatgatacggtgaatattaaaattgtttctattatcttgacagaggatcgctaatgtctcgccactaacatctttgacggtagtaatatcattgttgtctctacgaaacactgtttgcagaaaattacttctaataagttctgcctagcccccccttacctcccttccttcatctgaaatttaaaatggcattgcccttcttttaagacgtattggtcatggacgacgtcaaaatttttattgtaacccttcgcaatagaggggtcgatcattctacagtagagaattccatattcacctgtcccatcatcagcccattgttgtcctaatggacactttgtaaacgtctgttcaatttcctcttttttatagctactttcgaattcaaatagttcactacgtcccatatcgtaatgggataaataattctcgactgtattttcgaatccattcgacctagctcgttgcgcgattccttgtccgcgtttcttaccaaattgttcaaccgcagacatgataactgcctcccctttttccccgtattcatcaacaacttgtttcgcaatttgtgcgaacatcttggcaaagcgggcaaatggggttagacttgcatatttttcttgtacctctaaaactggtggaagatactcaaagaaatgatggttttgaccttctgaggttgcttgtatagcaattaattcagcatccttcaaaccaaaagctattaaccctttttttattaggttgtatccttcatcaggataagcttctaatatggctacgtgcagctcattaaacatttttgctgttataatttccattgataaattcttcaccataatcaactctctttttattcctattgatttaattgggattaattatataattggtgaaaacaattagtcaaatgaatctttcagcttataagtatgaagtgaactacccaccacttatcacccttgcaggtcgcttgaaagtgggggcttcttgggtaaacgccccttttggtagctgacgaaatggaccaagcgaaccctcttgttccaagagttgattgattcattaggcagtggctaataagcgaattccttcttttttgatgttcagcgcagagttgtagtctctatcaagagttagtccacaagtacattgatacgtacgtgcggataaggccatttcttttatggagccacattgcgaacacgtctttgtggatggaaaccatttatcgattttgatcagttgtttcccttactcgtttagtttgtactgtaagaaagaggtgaacattccccacccattatcagcgacacttttaccaaacttcagtgcttgtgccattcctttcatatccaaatcttcagtgtatgccttcaaatatgttgatatagggagaggtatgaaaaaatgatcagatccataaaaggaagacggcttcttataaatgaaaaagaaaaatacaaacgttcattaaatcttcagaacgcgttacctaattgcttcattttttcatattagactaaatctaaagcaacttaatctgacattcatgcagaagcattattccaataaatgccgacaatacagaaagaaaaaacgtcattggaaggagaatttgattgaagagaattttgcttattgaggatgatgcagcgatagctcgatatttagaactagagctaaaacatgaaggatttgagttgattatagaaaacgatggagaagacggattagctaaggcgctattagaaaagtttgacgtgattcttttggatgtgatgcttcctaaaattagtgggatcgaagttctacgcagacttcggaagtcgaaagaaaccacccctgttatattacttactgcaaagggagaggtatctgataaagttacagggttggatagtggagcgaatgattatatgacaaaacccttttttatagaagaattacttgctcgtattagggtaatctttcgcgaaaaaacgacaaacaatagccttcattggggagaactgacaatgaaccctgatacgtatcaagtaatcgttaagggacaagaattaggccttactaagaaggaatatgaactgctttattatttattggtaaatcgtaatattgcattatcacgcgaaaatattattgagaatgtgtggggatatgagtattacggcgatacaaatattgtagatgtgttcataaagaatatcagacgaaagctggaagatgttatggacgttaggatgatacaaacgattagaggaattggatatgtcattaaagataactaatctctgggaaaggctaaataaacgctttaaattttcgattggattaaaatcgattttaaccaatttagggcttttcaccattttatttactgtgatcggatttgtacttgtttttgcattttcaagactcctaattgcaggggcttccctaacattagaagaccatgaaagagtgattaggagtatggtttctaaaggggaaatcgatcaaatcgacgcctattcatctaatacgaatataaccgttttgttagttgaaagcgagccagcaaagacaacagggatatcaagtgacattaatcgtatgaagattacaaacaagtttaacgtggatctaaatggaaagagcactgtgattactatttcaaaatcacttgaacaagagtgggagattgttaggtcgattatatttgttcttatatttgtattcattataatgggcatttttgttttaatgattagtggttggacgattaaaacgatgttgcgtcctatacaagagatggtcaagttcattagaacaggcagtttaaatgtaagattggatgttaaaacatctcatgatgaattacgtgatttggcagaaacgtttaatgagttaatggataaaatatgggacacctatcgtcaacaagaccgttttgtttccgatgcctcccatgaacttcgaacaccgctattagtcattcaaggatatgctgatttgttagaacgatggggaggagaagatattgctatccggcaagaagccatctcttctataaaaaaagaggcatcgtatataaataaattggttgaaaggctcctgctgctagcaaagtcaggacaacaaatgatggaggtaagaaccattcatttgcctgaattgattgaagaagtcatacgagattcagtggtgatgaatacaggccatacatttatatttgaaaagaaacaggaagttcttgcggatggcgattttgcacttattaagcaagtcatcagaattgttttagataacagtataaaatatacaccttcttcaggtacaatttcttttaattgtgaagtcgagggaaactatgcgttgatttctattcaagacaatgggattggcatttctaaagaggacttaccaaatatatttgaacgattctataaggcagataaatctcgcagcagagtttccggaagtacaggattaggtttatccattgctcaatatattgttcaaatgcatggcggtatgataagtgcacatagtgaaggattagaaaaaggatcgaaagtactaattcgattgcctctgaaaagaacggtaacatcgtgacatgtagatatacgcagattaaacgatggctagtgagtagctggctgtatcaacttataaagagcatgggggtataaaatgaatggaattaaaaaatgaacctttctctaaaaaatcaagactactatacctagatcatataaaagtattattaatcttattagtcgtagctcatcacgcgggtcaagcatatggacctattgatgattggccacttgcaagttcagaaaaatcagcaattttaggtcctttctttgatgttaatggcgctttctttatggggttattttttctaatatctgcttattttattcctgcttcgatcgataaaagaggcgtttactcctttataaaaagtagattcatacggttaggtattccttttatcgttgtggtcattgtactatttgggccaatcacctattttgtcgatggagttagtggatcgttctgggaatatatgatttttgattatattggaacacttgattttgaaattggtcatctttggtttatcgcattattattctttctttctgtctgctacgccctagtacgagttataatgaagataccaaatcctgtaaaaagcagatcattaggacataaacaattatttttattttcaatctcattaataattgttaatatgcttattcggatttggtttcctgtaggagaatgggtgaatatttcaccttttatgccggtagaagttggacgtttgccacagtatattagtttttttgcctttggcattcttgcttatcgttctaattggttagaaaatattccaattaaaacaggcgtgatctggttcataataggaattatagcagcatccatgcactatttaaatgttttaacaggtttacggtctgtctatatatggctagttttagaagggtttattggcgttggcttgataataggaatactagtgataggcagggaatttgcgaataaacgcggaaaattacttgcttttatggcagaaaacgcttttgccgtttatattattcacatttttgtagtttatatattgcaaggggctatggaagaaatcccttctggagcgttaacaaagtttttcatagtaagtatcttagctagtttattgagcttcctatttagtcacttaattcgaaagatcccaactatgaaaaaagttttgtgatgaaggttacgatgaaaaagaaacagttgtaataaagatcgtgtaaataggcggttgctgcaacgttctagatttacacgttaatctaatatgagccatttcaacataatgttgaaagtggctccttttctttttagaaaaccgattttaataggacttgacgattccgcccccaaaagagatctgtgcaagtagttcttcgttatcttttcatgacctcgatcgttacttgatgccagttgttgcaatcccttgaatcaggtatttttggaagaatagaaacacgataaattggggaacgagggacagtgttgccattgccagaagcggtccccatgacgatgcgctagtagaatccagaaaactggcaagcccaagccctaccgtataaagtgacgggtcattcaaataaatcaacccaccaaaaaagtcatcccaactccataggaacgcaaagatcgtaacggtgacaagcaccggtttgcacaaaggcataataatccgccagaagatgccaaaggtagagcacccatcaatgacagccgcttcatctagttctctcgggatgcctcggatgaactggaccattaagaagatgaaaaacggtgtgccgcctacaaaggcagggacaattaacggcaaaaacgtattgacccagccaaagtagttaaacagaatgtattggggaataagcgtaatttgcatgggcagcatcagcgttccaattaaacaagcaaacaatacattcttcagcgggaatttcaaccgtgcaaatccgaacgcgacaaatgaagatgaaatcaaggcaccgatgatgttcatgcttgatacaaagagtgagttgcggaaaatttggtcaaagccaacgctgccaaaccctttccaaccttctacgtaattgtcccaatgaaaagcagacggcagcaaagaagctgcctgctggaagattcctgcaggtggctttacggagctgctgatcatccaaagcacagggtaaagcataaaaaacccaaacagcagaacagtaaagtgatatagaaacgttttaaacctcctttttgtttgcacctgctcaccctttctctgattcataaaacacccattttttcgagctatagaaaagcaatcctgtgacaatcgcaatcacaatgagcaacgtccaggccatcgcagaagcatagcccatttcataattggtaaacgctcgttcataaagatacaaagcgtaaaacagcgtgcggtcaagagggccgccttgtgttgtcacaaatgcttgtgtaaagacgagaaatgcaccaatcatttgcataatcaaattaaagaaaatgacaggcgtcaacaatggaatcgtgatggataaaaatttgcgaaacttccctgccccatcaacggacgctgcttcatataaatcttcaggaatttgcctaagccctgccaaaaagatgatcataggagaaccaaattgccaaataacaagcaagatcaacaccattaaggcatggttggggctagcaatccaactttttccttctacgccgaaaaacaacaaaatatcgttaatggctccttgtccgccgaataactggcgccacatcacagctacagcaacactgccgccgataatggaaggaatataaaacagcgtcgtataaaaccctgaccctttgcgtttattgttaaacagcatcgcaatcaacaaggcaaacgctagtttgattggcgttgacacaaacacgaatacaagcgtgaccgtgattgaagtacggaacctcggatcattggtaaacatcgtgatataattgtccaagccaacccaattagggctcgtcaacatatcaaaatcagtgaatgagtaataaagcgacgcgatcatcgggccaatgacaaagcctaaaaacccgactagccatggagaaataaaggcaaatccgactaaatactgtttccaaacacgccatttcgcgcttgtttttcgattcggcggatactcggctcttatcgtttctgatggtttcattcgtctctcctttatcatccactggctaattgcttaaaatgatctccacttcgccccggaaacgctcggcaaattcctcggcgcttagcaactcatactcgaattcttctatcattcgcgcatataaatccaaaatctgacctgtacctgctgggtctggtggatggatcggcgcagccctctgttcaactaattgaacataatcaaattgcagttgtgtattttcgctgacatgatcataaaggtgatctcgaaccttttcagaaatcggcacgccccgttcagcgtttaaaatttcattggcttctatactattgacaaaaaaattgatgaatcgcgcagcctcttcgctcttgtccccttggcttgtagcagaaaatagcaatgacggtttgataaaggaggcttctgatccaccttccattgctggcaaagttgtcatctgaagcttacggccagcagcttcattgagtgcgacaatttgattgctgtgaggggaaaacgttgaagcgcgtccgtggacaattaattcatcttggatgccttgcacctcggctttgacatcaggaggcgcagccaccccactgtcaagcaagtctttatacatgttcaagaaatcaatcaagtatttgtcgtcgtcgtagccaagcccggtgttgtcttcgttgtacaaccacaaatcatgttggcgcaaataatgcttaaaaaaatttaaactatcgccgaaaccgtacgcatacatgccatccaagttttcgtgaattgttttgactgcctctatataatcctcccacgtataaccaggctctagtgccggaacgcctgcttcggcgaaaatctcagcatcataagcgatggacatcgcattggaaccaaggttaattccatacaacccttcgtttacaatgccgccttctaaataaatgtcatccacattactaaaatcgagcgttccatcttccacgtagggggttagatcaacaagcaaatcacgggagacatattcgttgatgtactgtaaatccatttgaatgacgtctggcaagtttctgcccgctgcttgcgtcgacatccgttcccaatagccgtcccagccagtgaactccgtcgttatagcgatatccggattttcagcttcaaacagtttaatcgcttcgattgtgcggtcatgccgtgcttgcgagccccaccatgcgactctcaactcggtttggccgctttttaagtccgctttctcgccgccctctccttcggctacttccgtttccgacgatgagcatgctgtgagcgccacgacactcactaaacacattccagctactccttgccatcctttcattttgtcgcctccctttttcataaaataaagcgctttcatttagttctagtttaaaaactctttttgtgggtgaatagatgacaaaagggaaatagtttgcacaaaagaccatttaaaagaaatatgggacgcttttactctttttggttaataaattcagttggactgacgtggaaaaaacgcttaaattgccttgtaaaataatggacatggctgtaaccgacttgatcagcaatttcataaatatacagctccccttcaagcagcaactgtttcgccttttccatccgaacgcgggtaagataggacttaaacgattcgccgactgctttttgaaacacaatcccgaggtatttcctcgataaacccacctcttccgcaatatctttgaggacaagatcttcgttataatgggcatgaacatagtcgatcgtcatttggacagcgcggcgatgcctcgcgttgccttctgaaatcgaggcgatgcacgcttgatcaacttgcgactcgatccatgcttcgaagtctttgatcgtcaacaattggtctggtgccacttccactctattggcacagacatgttggccggttctatttcgtaccgcatcacggatcaatgcttgcaagctgtttgcatggaaatgaagcaatgaaggccgctccagttctttcgcatcatgtaaataagacacgaccgctcttgctgcttgttgtgctttacgccaatcattgtcgcgtacggctgttgccaatgtttcataaaggggtaacgactcgccggttatttcaaaagggcggtcaagcaatggcgcaaccgcatttaagcggatttccaactgtttgcttttgatctcctcttccgcctctgccgttaagcgattgacgattttctcgaacacagtgaaaatcgtcatttttgaagccggtttgcttaaatagtcatctacacgtaagcgcagcgcttgtcgtgcgtattcaaaatcatcgaagccacttaaaatgacaacctttccagcaaatccatcatccctcaccgttttaaccattgccaacccttccaacacaggcatataaatatcggttaccacaatgttcggctgattggtttgaatcagcttaatcccctcttcgccgtcatacgcttctccaacaaaagtcatgttaaacctctcccagggaatgatgccttttagcccttcaattacttgctcgtcgtcgtcgataataaccgttttccacatatttgtttactcctccccaatcgcttgtttgcttttgcggaatttcaatcaatactgtcgtccctgcccctattgcactgtaaacagtgatcgtcccttcctcaccaaaaaacgctcgtaaacgctctgcgacgttttgcaaaccataaccatttttccggggaatcggctccttttgatcaaaccctacgccgtcatcttttacttgtagctgaagcgcctgtttgtatggacgaatggaaatgtcaatcaccccacgttggcggcgatgaaatccatgaacaatcgcgttttcaacaatcggctgcaacgtaaacttcggcacatagtaatggtggagttcagatgggacatcgatctcaaatgaaatatcgacgctttttgtacattgctggatttgcatatagtagcggatatggtccagttcatcggcaatcggtatgaaacttttccctttcgagaggccaatccgtagcatttttcccatcaattcaattacttcactgatttcatcttgtcccttggcaatcgccatccaatttaattggtcgagtgtattgtacaaaaaatgtgggttaatgtttgcctgtaatgccgttatatcagcttcatttttgcggcggtgctcttcctctaaagattggtgcaatgcatgaatttccttcgtcatttccgtaaacccttcaaataaatcgccaaattcattttgatagccaattggcacattcactttttgagatttgccaaattgcacaaacccttggcgtagctggagaattggctttgaaaacgccgtagacagaaacaaagcaaacaggagcgcccctgcgatcgctactaggctaattgctataagcacagctgtaattcgtttcccccctttcgttagctctccccatggcgttacctcgacaagaaaccaatcagcacgctctaacgctgaccatacagctagcccctggtcaagctctctttttccaccttggttaaaagaatgttcagctacgattcttcctacttcttcgtctgtttcatgagcggccataatcgcctctccatttttgccaactaacattcgctgatttgcatgatgatccctatccacaaacaaggcttcaaaatcacgggtgcggacgttcagtactaacatagcttttaacgttccttttgccgaatacagtttgcacatgtaagagacgaccttttcctcttctgttaaatgtttgtcgtgctctcctagccaaacttcattggcctcatttacttctttgttttttggatggctgtgcatatcaatcttagaaagaaaacggatcggatattggctatcaaaagttgggggattatccatgtatatatcaatggaatcaatcattgatgaacttaatacaacttgatgcaaatacttgtggaggttgtttcgttgtcgattataagaaaagtgttcgtgtcggttattgataaaggcttgcaaatcagcatttcttgaaataacaactgctgtttcttccaacaccttcatctggttatccaattcattccggtataagtgcaaaagctccttttggtgagccgacgtcgaggcaattgtttccgacaccaccatgcgataacttacgccaattacgacaaaaaacaggaaaataataaacagcgcaatgcttaaaaacagaatggttttgacctttgcctttttaaacatagcaaccaccttatcgcacagccaagtcaaggctatatttgtcggcaacattcatcagactgatagaaaacgcttgtcaggcgagggaatacgcgaacgaacatgggttcatctgtaaaggcctggaagcgtttatttacagtcacagcacccgcgatggacgcgagtgctgcctgctacgttttcagcgtttctttaatcggagtaaaaccatgttgctgtgggttttcatagcgttcaagcaatgcatcagctaaacctggcacgacccggtagccgtcaacttgcttgacattagcaaactcgtgaataggatgttgttttaattgctcaatgatttgtacatgggcaaatgctgtttcgtacgtacaagggaccgttttgtttgggtcaataactgcttcaatacagtcgtccaacttcgcaaatgaatcatcgtgagtaacgccaagcctgccatatacttttgtagaaccatctttaaaataagcgatgacgtggcccgttttattgttgcacctatattcgattgtcgctttttcaaattccaacgcaaacatcggaccggcctcttcctccgtagcgtgtgaggctacaaacaatagcgctgctccttcgtctgttttcgctcgcaatatgcatgtgtcaaatgtttcaattggattggcccgatacaattcagcgtcgatgtcaatgacgttggcgcaagtatcgattttgtcgcctagcacatacaacaaatgatgaagaaaatgggctgcggcattgttggcaatgctatcaaaaatcgcctgcccttgctgggagaagcgttttcctgcccaatcggaacgttggtagtacgcggtgtttcgcggccaaaacaccaatgtctttagcgacttggcccgaccaaacatgccggccattcggtcacgctttaacgcatgaacggttttgctaaatgaccaattaaaaccaatcgctgcccatctttgcgcctctcttactgctttttcccacaaaggaaaatcattttccatagcggaaaggggcttttcacacaagacatggctgccattcgttaacgcttccagagcgtggactgtatgaaaatgaattggtgtagcgataacagccaaatcagcatgatgttctttataaaacgagcgtagtgaatggtagaccggtacaccacgctctcgtaaatcgggcaaatacgggctacgttccggcgcattgtcaacaacccctgcaagcagtgcttgtttgtgggttaacagcttttttacatatccactgccataaccattaatgccagccactactactgaaaccaaatccgccattttaagcctcctcgttcgtgccaacaacgcgattagacgtgggcatcaaaccgctcaatgatcttcgccattgcttcatcaccggaaaggttccaaagcgactggttcataatttcgacttcaatcggtcccttatatcctgcttgttctactaaccggcgcatgttctttaagtcgattaccccatcgcccataagggacctgcctttaaacatgtctgtaataggaacgttccagtcggaaacatggaacccaagtatatgttggcctgcccgttcgatttgttgatctagctcagggtcccaccaaacgtggaacgcatcaacgattacaccgacttggtttgtgccgatcgtttcagctacatcattggcttgccttagtgtatttataacagaacggtcagctgcgtacatcggatgaagaggctcgattccaagtttaatcccgcattgttctgcataaggaacaatcgcctcaatccctgcttgtacatgctttcttgcttccactaaatctttgccggcagctgggccacatacaaggacaagcacattcgcgccaagttcagcggcttcgtcaatggcacgccgattgtcttcaattcgctggagccgctcttgttggctagcagcaggaaacatgccgccgcggcataagctggaaagggaaaggccagcatcacgaatatgctctttcgcttcctttaagccgtactcatgcagtttatgacgccaaacagccagccagcccacgccgtggcgggcgcagccttcaatcgcttctggcaacgtccattgttcagtcgtaatctggtttaaactgaaacgctcaattccaggagcaccgctcatacgcgcacctcctggctaataccagccgcttcaagcgttagcaccatccgtttaatcgctctctcaggctcaacgagcaagcctgcttggtcggctagcataaatagctttgccaagtgaacagcagacctcgctccttctgcgcctccaatcattcgaaaatggttttggtgcccatttaagtaggccataaagacaatccctgttttgtaggcgtaggtcggcgcttcaaaaatatggcgggcaagtgggacagttggcgccaagatccggttataggtttcgagatcgccgcggtcaagcgcttggaaagcttcagcagctgccggcgcaattgcgtcaaaaatgcctaatagcgcatcgctataaaagccgttttccccagcaatcagttcaggatagtgaaaatcatcgcctgtatacattcttacctgttgaggaagaagacttcgcatagccacttctttgcttttatcaagcagcgatagcttgatcccgtctattttgtgcttgtgttcatgaataatctccagacaaacatccatcgccccgtcaatggatcgatctccccaataaccagctagattcggatcaaacatgtcgccaagccaatggagaatcaccggttccttcacttggcgaagcaggcggctatacacgctccggtaatcatctcgtgaccgtgctgctttcgcaagggcgcggcttgccatgagaatcacacgactgccttgcgcttcgacaaactccatttgttgttcataagcggaaatgatcgcatcaagcccatatatctctttgtcactcaagtgatccgtccccacacctgaagcgatgtcaccgccgactgcttttgcgtcctttgccgaataagcaatcaactgtttggccgcttcccatgttaagcccatccctctttgcgctgtatccattgcttcagcaacaccgaagccgagttgccataggtggtggcggtaagaaagggtcgcttcccagtcaactttgccgcccagcactggcggtactggcgataacggatcggcgacgacatgagccgctgagtaggcacgccgtgcggaaaaaccagccgtcttcagacatgcaggctcagcattctggagcgtataaacgattttgtttctgtcttcagttggcaatgtaatcgtgtaagccatcgtttttgcccccttaaatatgctttgccggaacagttgccgccagtttaggcacgtcaacccacttccgctcacgccatgcttgtaaacctaagtctgataactgtgtccctttggctccttcaagcaagtcccaaggaaatggactgtctgtatgaacatgtttcaaaaacagttcccactgtgccttaaagccattctcgtaaggctcattgtcaggcacttgctgccagagttcctggaaagcgatcgggtttggtatatctggattccatgtcggccgaggcgtcatgacacggtgttggattttgcaatcgcgcaatcccgcgactgcacttccatattttccgtcaacgtggatcgtcaataaatcatcacggtcgacacgtgtcacccatgaggaattcgcttggacaacaatcccattttccaattcaaaaatcgcataggctgcatcatcggcagtcgccttgtatggttggccatcctcatccacgcgtttgcgaatatgagtcgctcctaggcaagaaagagattgaatttcgccaaacaagttgtcgattacataccgccaatgcgcaaacatatcgacaataatgccaccgccatcttcttctcgataattccagcttggccgctgcccttcctgccaatcgccttcaaatacccaataaccaaaatcaagtttcaccgaataaatgtcaccaaaaaaatgactgtcaatcaatcgttttagctttaacaaaccaggcaaaaacagtttatcttggacaacgccgttcttcactcctgctttattggcaagttcagctaattcaagggcttcgtctaagcttgtcgccgttggtttttcgcaataaatatgcttgcctgctgaaatggcttgcttaattgcggcagcgcggcggctcgttgtttgtgcatcaaaatagatgacattgtattcgtctgccagcgcctgctctaagtccgtttcgatccggtttagcccgtatttgctcgcaagcgcttcaagttttgcttcgtttcttcctactaataccgggtcaggcataagcgtctccccattaggaagcgcaacccctccctgttcacggattgctaaaatcgaccggattaaatgctggtttgttcccattctcccggtgacgccattcataataatgccaattggatgcgtagccattcttatatgcccctttcatctaagttcgcttttaattgaatgaaagcgattttgtcgactttatcgccaacctcttgctctcagtttagtgaaagcgcatccaattcgtcttatcactccccgtttttcgttctcagtttccgaactaaatcagctagggtcattgagaaacctctatagcagctatttttggttcttattctgaaacatggtggtgatgatattggcttaattgagtatgtttatagactaaaggactaacgccaacttgctttttaaaaacgcgataaaaggtaggcaacgattcaaagccaacttcgaaacaaatcgaaaccatatcaaggtcagtttctattagtaatttctttacgcggtttaaacggacttcggttagataccgcatcggcgtcgtatcatatgcgtctttaaagatttgctgcatatagcgggagcttacccccattttggcagctaattcttcagcgcggcttaactggtagtaattattttcgatatactctttaagggcggccgcacgccactcatttgtgttttggtaggtaaatcctcttttcgtccgctttaatagcagcaacaactctccaagcaaaagcgacaagccgattttttcgcggtccctatactggagttgttcgtaaagcatacgccttagcaattggcggacttcactccctttaaacaaattgaggcggagcacttctgaacgggcaaacacgtcagctataagcgtgtgcctgtactccacaggcagttgcttttcatcaaactctagcacgagcatagtcatttttgattgcgcggcaatcgagtggtgtgtcaaagggcgaatgatgagcaaattgtcagaagcgagcgcatgctgttgtttccctaactcgcactccccttttccgtcgaggacatagagaagctggtgtgtataatgaaaatggctatgaatgtaatttttctctttatgcttgttttcatataaataaaccgctccctttggcttttgctttccagtcctcacaaggctcaactcctttcttagggcgatttactctcctgccatgttactcgtataggttcgattttgctgactgtaatcctctttttgctgaaacgcccttctatgccttagcctcgctgttaagtccagttaagcgcttttcccataacgttcatgttggatttcttccaatgaccggttccttgtctctggcgccatgataacgccgatgactaggctaatgaccaagaaagcaatcatgatcattcctgatgtttgaaagccgattgtcgaaatcattgccggaacgacaagggaaatcaaccctacgccaattcgtacgacgcaaaacatcaatccttgggcttgggcacggtattttgtatggaacaactcgctcgcaaacagcgcatagaacgcctgggcaccgaagcctgcagccaatccccagatcgttacaaacaaggcaagctcggtcatgcccataccgccaaaagtcagaatgagccaggcaatgatgcccaaaacccctcccgtcccaaacaaaagcttacggttcactttatcgccaagcttaataaacaccgcataagtagcaatcaccgtaaatgtccaaaggacgccttgcagcaaattggcttgtgctgctgacaaaccgcctaccgtttcataaatatatggcataaaatatcccattgtcccagcgacaaggttccagaaaaagtagatgccaatgagaaagataagcgctttcaaatttgctttgatcgtaaacaaatcttttaacgagcctttcacagcagcctggccagattgagtcagccgtgctttttcttgctccttttcccatatttgcgattcattgatttgctgttgcaatatccaagtgatgatcgccaccacaaacaattgtgcaaagatcaaacggctgcctagtaaaccgaggggagcgagcgctaccgacaaaaaaagcgtaatagcaggcccaatcgaccaagcgaactgggaccaaccgactctggcagctcgttcgttaggcggcgcctcttcggcaatatatgtccaagctgctggaattaacgcgccaacagcaatgccaacgatgacatagccggcaagcagcataggaaaggaaaaagcaaagacaatgaggagcatgcctgccatatatagcaacaaatcatatttgtaaataaatttcctgccatagcggtcgactaaagcaccgccaatcagagccccgattgctgctccaaagccattagcactcaaggcgcctagcaatcctacccacatgtcggtcaactgcaaatactcgacccataatgttagcccaccagcgcccgcaacaatagcgcctgcttctagataattggacatcgctaccgtaatcgtggctttcatccctttattttgccgcaccatccttaccactcccttatgctaaataaaaaacttctcttaaatcatgggaaactggacttagatcatcatttgtttccattagcggcgccatatacgcccaccatttttggcatatctctgttttggcgacttcgctaaaactggcttcgtcttcaacaagcaaataggcaaacagctggccagtctcctctaacagaaaaatcgaataatggtggacaccatgggcttttagcatttccgccatttctggccaaagcttatcgtggcgttgtttgtaatcatcgtacttatctttgtaaaccttcattactgtagctttgcgaatcatgctcgttcactcctcttactttgatcgtcttttcatacaaatttcctccccgcatttttaacggagaggaaaccacccttatcttggaaaagctgctggtacgccgccatctacagttaacatacagcccgtcgtcttttctgacttggacgaagcaaagaataaaacggcctcggcaatatctgcgggaaaaatatggacgccaagcgttgtccgttttttgtaatggtcttcaagttcatcagctgcaattccgtacgcagctgctctttcttcacgccaagccgaatcccaaatcgctgaaccttgcaagacggcgtcagggagaaccgtattaacgcggattccgtaggtgcccccttcagcggcaatgcagcgggcgagatgggcttccatcgctttggctgcgctgtaggctgatgcgttttttcctgcgtaacccgaatttttcgagccgataaacaccatgctaccgcctgtgccttgctctttcatttgcgcaaaggcttggcgggcgacgagaaagtagcctgtcgcaagcacatcgagattgagctgccattcctgtaaagtcgtctcatcaaaagggcttgatgtggcaaggccggcattgttgacaacaatgtcaacgcccccgtatgtccgggctacgtcggcaaaagcttgcttgactgcttgttcatctgtgacatccatttttagtgcaagtgcccggccagcaccgaattgcccatttatttctgccgctacttcttctgccctttcaagattgaggtcagccaacacgacgtgtgcgccttgcgcagcgaattgccgggacgtttcgctgccgatgccccctgctccccctgtcacaaacgccactttgcgcgagaacgttgcttcttttggagcaagcgatagtttgtaaagctccaatggccaatattcaatttcatacgattcggcttcatttagtgaaacaaacgagcctaatgcattcgttccacgcatgaccgcaatcgctcgttcataaagagcgcggctcacttttgcgttttcaaccgccttgccgctgctaatcaggccgatgcctgggatgagcaacacgcgtggcgacggttcaaacatcgtgtcgccttcacggcggttgcgctcaaaatagcgaatgtagtcctctttgtatgcggctattccgttaagcaccgcttgcttcaagccttcttcgtcacttgcatcaggcacccaatcgataaacaaaggcaatcgcttcgtatggacaagatggtcagggcaggcagcgccaatttgcgatagctcctttgcctctttgctgttgacaaattcaaggataggatcgctatcatcataggtcacaatcatgttccgcccattatgggccactgccccccgtagcaccggcatgatgttggccagcaatgcttggcgctcttctttttttagccctgctgtcgcagctccgccaaaaggcgcgtttttgcctcgctttttctcgataaattgctctgcttcattaatcacagaaatcgtgcggtcataactttctttagctgtttctccccagacgacaaggccatgtttttccattagcacaagctccgctttcgggttcgcgtctacttgttctgcaatcattttagacagcgcaaagccagggcgaatgtaaggcacccatacaaagcggtcaccgaatagctcttctgccaattcgcggccattttcagcacaacataggctaatgatggcatctgggtgagtgtggtcgacatgcttaaatggcagaaaagcgtgaagcagcgtttcaatcgacgggcgcgggtgacgagggtcgattaggcaatgccccaaataggcgaccatctcctcatctgtcattgcttcccgttctttcagcggcaagacatcgtcaagccgcaagcccgtaaagttgtttgctcccattgtagccagatcagagccactgcctttgacccacataacgtcaacttcattgccgcgaaagtcaatttcagtcgttttcatcgacgtattgccgccgccccaattgcagacagatcggtcggcgccaatcaaattggagcggtacaccaactcatcgagcccttgacacaatttgcttgcttcttccacattccacagatgttgtaccatgacgatccctctttctagtaaattagcgttgcttcgctttttcgctttcacgcttcagttggacttgctgttcgtattccttgacgacatctagccactcggtttctgtcggcactccttggcgtttgcaatactcatcccacatgtcgccaaacggatacgtttttagctgttcttgcatggctaagcgcgacgtgaaatcgccttcatcttgcaactgctttaaatggcgatggggcattaaggctgcatacaatagcgcctttgccatattgcgcgtgccaatggcccaggcagcgacacgattaatgcttgcatcaaaaaaatcaagaccaatatggatgttgccaagagcatcgttacggactagttcaatcgcaatttctcggagctcatcgtcaaaggtgactacatggtcactatcccagcggacaggacgggaaacgtgcaatgccaactgatcgtggaataacaacatcgctgatagtttgttagaaacgacttctgttggatgaaaatgaccggtgtcaagcaaatacagcttgttgttttggttcgcatagtttaaataaaactcgtgtgacccgacaacgtacgcttctgaaccgatgccaaacaatttgctttcaacggtatcaagaacaagcattgggtcgtattcgtctgcataaatcgcatctaaagactcttttaaacgcttccgtggcgttagccgatcactaggcgtatctttataaccgtctggcacccaaatgtttactagcgatggcgtccccaactgttccccaaaataggcagcaattttccggcatgccttacaatggttaatccagaatgtgcggatttcctcatctgggtgggcaagcgtcagtccatcagcagccttaggatggctgaacaccgttggattgaaatcaaggccaatgcctaatgatttcgcccatttaacccacttttcaaaatgctcagtcttcaattgatcgcgttcaattggcacgccatccgtttcggcatacatggcgtggagattgacgcggtgctttccaggaattaaacttagcgctttttccaaatcacgccgcagctcttcaccattccgcgctctgccaggatgattccccgttacatcaatgcctccagacaactcgttcgcaatcacctctgttccatgaaggtcatctccttgccagcagtggacagaaatgggcacttgttttactttcgcgaatgctgcctcgacatctatacctaattgttcatattgcactttagcgctttcaaatcgattcgacacgtgcgattcactcctttgtggtagaaagtaagtaacaggaaacgctgtcctgactagtgcacgaccttcctctatgcgagaaagctctccgtctgcaatcgcttgcacgagcagattgccaacagcagttgcctcagttggaccagcgatcaccgttttgttcgtccggtttgctaaacgttggttaatctccttgttcagcgccccgccgccaataatatggatttgctcatatggctttcctgaaatagcttcaatttcggttacagctttgtcataactggcaatcagactatcataaatacacttagccaaatcacctggcgattcaggaacagcaagccccttttcacggcaagcttgttgaatttcctcgatcatgttttctggctttagaaaacgatgttgatcgacatccatttccccggtatacgttgactcactcgctgcttgcgccagttgagaaaagctccaatgcccagggagcagcctttgtacttcttggatcatccataagcccatgatgttttttaaaaagcgaatacgggagccaacgccgccttcattcgtaaaattggcagccatcgcctgctggctacatatcggcgtgcagttttcaatgccgatgagcgaccacgtgcctgagctgatgtaaaccgatgtttgtttttctgggagcgccgcaatggctgaagctgtgtcatgggtagcgggcacaatgacttcgagttggacgcccagttctttttccatgctttctgtcaaagaaccgatctttgtgccaggatgctgcaatggctgaaacattccacaaggcaaaccgaactctttcagtagttgtctatcccaatcctttgtatggacattgactaactgggttgtcgttgcgttcgtatactcattgactttcacacctgtcagcaaaaaatgaaaataatcgggcaccattagaaatgcatgggcttgctcaagcaactccgggttttgtttttttaacgccaatagttggtaaagagtgttaaaaggctgaaaagcaatacccgtccgttcgtataatgccttttttccgtaagtctcgatcacaccttccatcaccccgtttgtgcgcgggtcacggtaggagatagcgtctgttaaccgctcgcctttttcatcgagaaggacaaaatctaccgcccatgtattcatgccaatgctaactggctgtaaccctgattgaactgccactcgtatgcctttcttgatttcgccaaacaagtggtcaacgtcccaacaataatggccgcccattaattgagcctgattgtcaaaccggtagacctcttgtaaatcgatgccagcctcgcttattttgccggccatcaccctgccgcttgaggcgccaatatcaacggccagccgatattcccccaatgttcctccccctttctcgctatagaacgattacttgtatcttacgtgtttgtcacggaagccactatagcgtcattcaccaaaatactgtcgttatttgcaaatattgaatcaattagactggttgaaaacgcatgttagatagggaggtctgaaaaaggaagataggaatagcacagagggttcatgagtaggtgaccgagacaaacggcgacgggtcaagcgcttgtcttcggccaaacgcatcattgaggaggcgatgacgcgtgtttttttcgataaacgagaggagtcgtatgaaaatgcttcttaaaaatttgatagaaatagctgaagttgtcatagccaatttcttgcgcaataacggatacaggtaagtccgactgaacgagcaactcctttgctatgtccagtctcctttcttgtaacagcgctttaaatgtttttcccgtctgcttcttgatgactttgctaagcaagtaatggggctggttcagccgttcagcaagctcatatagagaagcgtgtttgtactgctcatcgatataagcaaacgtttgccgaatccattggttgtgcaaagacagcttttgctttccatctaatgtattcgctttctttgccaactcaatcatgagcatgccgacatacaacttaatggacgcttgcgaataagcgtctggctccatcatttcctcaaccattttcctcagcagttgttgcacagacgcttcttttgcacatttaaaatagaggaactgtcctagcggttcgctaccatgaatgctgtcgatgaggaatgaataaaacggcccttccacatttaaaaaggagaaaatgtaattaaaaaaagacggctgaataataaaattaataatgatatcttctgtaccgcatgcctcgatctcgtgttcaatatgctggtttaatacaaccagctcccctttttgcaattcgactgcacgatcgccaatcgtttgctttaaactgccgttatagacataattcatttcaatgtagtcatgcctgtgtggaggaaaatcaataaagcgcgtatgcttgcggatcatgatttctgtccctggggcaagaaacttattggcttcaataataaattgttgctttgatgtataacgtgctttcattacacgccgatattcaagaatgtctttttcttcttctgtaagcggcaacattttttcaagcaaccccaccattggtcctcctttttcgtcttgcttgtctagtctctgaagttatggactactatctactggtcttgtatctgctttgttcctcgccacgcctagcagcatttgttcaatcatgccactaccgctttgctgtcctcgtatatatatgacttggccctttttaaatcaaattcaacaaagaaaaaggaaaatccttcttttattggatatgaactcaaacgccaccatgaatatatattcgttttcggcaattaaactattgataaatacaaggacaacgtttaatataataagaattaatgcatttttatacaaaaatcttatgcaacaggagcacaacagacgatgaagaaaaaaggaatgactactactgacttctttggactggcattcggcagcatgatcggcatcggttgggtgatctctgtgccccaatggatggcctcggcaggaagcctaggcgcaatcattgccttagcagtgacaatactgcttgtcattccaattggctttgtttatggagagctcacgtccagcctaaaattaagcggtggcgaatttgcctatacccattatgcacttggcaaatggccagcatttatttgtggctggtttctgattttaggctaccttattatcttgccatgggttgcgatttccgtgccactcttgttcgcttacgtttttccgctattaaactcgtatcccctttacacgctaatgggacaagtcgtctatttgccccacattctgctcagtttagcgatgatcttcggtctatcctggttgaactaccgtggcgcgacattgtcagcacgctttcaaacgattgctacagcgatgatgcttgtcacattccttgcttttttaggtggcggctttttcctaggcgatcctcagaatgcagcacctttgttgcagacagaaaatgggcatgcatttaacggcattattttggcggtctcctcgattctattttttatgaatggctttgatactgtttcaaaaacggttgacgaggctgaagcaagcattaactacaaaaacttaggcaaagtcaccgtcgggacaatccttttaggcggtgggctgtatatggttattgttcttgcttctgcctttttaatgcctgcctctgaaatgggggaaatgggggcgctccctcttatccatgcattagaagcccgttcaggttcaatgttgttgccgcttattgtcgtatttggcgtgctgcttggcgtcattacgactttcaatggctttttactggccggaagccgtctgattcaatcatttgcggctcgcggttttatccctaaaggatttgcagcaaagcatactcgttataaaacgcctcacaaaacggtgtgggcaatggcggccttttctattgtcggaaccttatttggcagtggcgccctactcccactcgttattatgggaggaattgcttttctcattgcatggttttgtatggcatttgcggccgtcaccattcgcctcaaacagccacatttacaaaaaccatataaaatgccaggcggcatctacatggcttatgctgctacgtttttttcggcggtcttgctagccgcaatgctgattcctggtacgccgatttcgatgggcatgacggagtatatcctctttttcatctggctcgcagctggagctgtcctttatgtttgctacacacgccgaagtgttccaaacaaggtagaagttacacatctagaagataaaggagtgcatcaagcatgaaaccatattctacttttggcattgtcggtttcccttgggatggaggggcctcccttggacggcctgggtctcggtttgctccagaaaaaatacgagaagcctttgcctggtttgccaatcgcatcgaaaacaaccaagtgtacaatgtagaaaagcgaaaaacgttcacattgccgaaaaacgcgttaaccgattatggcaatattgaaattgctgcctacagcacagaccaaacgtttgcacaggcagaggcaaaactgaaagcagtgcttgctgatcatgcctttccctttgtgcttggcggcgaccactcgatttcctatccgctcattaaggcgctgcacgaccagaaccctggaaaacggataggcattatccagtttgatgcccatcttgacctcgttgacgaatcccctgtccaagggaggttttcacagagcagccaaatgcgcagagcgattgagcttgaacatgtttctgctaaagacattgtccaagtaggggtacgcagttataattacccttggtacgccaactatttaaaagatatcggcattcaccaaattaccgcgcaggaagttcaccagtcagatccgttggccattgccgaacagattaaatccgtaatggaaaacgtcgatcttgtttatttaacatatgatatggatgttctcgatccggcatacgcaccaggagtcggcgccaacgaaccaggcgggctgacgccagttcaaagtttcgcgattctagatgcgttgtaccccatcgttgatgcgtttgatattgcagaagtcaatccactgtatgaccatcaagacatcactactgctatggcggcgcgcattatgtttgattgttttgtcgctaggatggaatgtggggaaaacgctcaaacataagcaacaacagcgatttaaacaaaacaggtttaaatcgctgttgtcttttatacaaacaaactaattaaattcccgtctgggtcttggacaatcgcataacgttgcccccaaaaggcatcccatggctctttatagccaacatagcctttgtggacaatcttcgcataaagctggtccagcgcttccctgctttcacaacgaaaggccagctcaacccggtgccccgttggctcttcccagctgccgtaaattccctttgccatttccagcttatcaaacgccaggcgaaccccttcctggtcaatttcaacgtgcatgtcgtcattgtgcgtttccgctatttgaaagccaagcaatcggtaaaaatcaagcgcttctctcatattggcaaccacaattccgaccatatctaattttatcgtcataacaaatgactcctttcaataggctataaggccattattgcctattatcccaatcggagcttgaaaaaaccggacaacttttaacgatttgttgcttggcacgcgatttgtgccattactgtctgtggggccaatccgtaaaaacgcttaaattgattcgacaaatgggcatggtcggcatagccgtataatagagccaaatcagcaagacgtgcatggacgttttgctgcaagcctactaacaaactttggaattggacgacttccaatacttctttcggggaaacgccaagctcatgggcaaacgtacggcgcacagtccgctcactgtaatgttccatttctgcaagcttacggacagagagcatacctttgtttgcaaaaatatgacccatgcagcgctcaaacaagcgttccggtcgatatgccttatctagtttttttcgtaagaccgcctcaacgaccgcaattctctccttcatatcgcgggcttgtgcgatcgtctcggcgatttcaaaggctggattcccccatactagctctagttcaatgcctccgtctccaaaatcagcagggtggtggcgcaataatgtatggaccgaatccgaatagaagcggattccgaaagaaaaggttggctctgtcaacggcaaaacgtcaaatcgattcataaaaccggccacaaatgcctgtgcgttattgtcagtgatcgaaacaattaaatcgacgcatccatctggaagaatacgattggtgtcgcgctttccctccttggaacgagctcgtccaataacaggccacataggcggataaatcaaagcttggcgcatactcagtatactggtagctatcatcgctttcttgctgcaaccatggcgcctgaacaggacgaaacaagcgcatacacggatccctctcttccaacgtacatgtagtctgcttcttgccttcatgatacagtgcctttcagccaaaccaaagattacaaagctttcactaatccgccgtcgacgagaaacgcttgtccagtcacatacgtattagctccagagcagagaaaaacggcatgcttggcaaactcctctggtttgccgtaacgcccaagagggatgcttttttctgaagcctgttttacgtcttcgtatgacatttgcttttcttttgcggctaaacggtcaaggctttcaacccggtccgtggcaatgcgccctggacctaacgtattaataagaatgttgtcttttgccaactcttgcgctaggcttttggcaaggcctagtacccccgcgcggaacgtatttgacaacagcaaattgtcaagtgactgctttatcgatgaagacgtgacattcaatatatggccaccgccttgcgccctcatgtatggcagcacgccacggatggcgcgcacgtagcttagtaagtttaattcgtaagcattttgccagtcgccatcttcaaactggtcaattcccccagctggcgggcctccagaattgttaattaagacatcgatagccccgtgtttttcgtttgcaaaagccagcgctgcctcaatatcttctgctctagtcatatcgcagcggcaacacgcaatctggggattgcctgtatgcgcctgtatttctccaactgctgtctccaatgcgttaatatctcggctagctagaacaacgcttgctccttctgccgcaaattcgccagcaatcgcccgaccaattcctttgcttgaagcaaacacaagtaccgacttgcctttgacgtttaaatccatatccatgcctctccttccccatcggtgatttggtttcattttaatgtcagttcattcacttttcaatctgttatcatcggacttgttggctattcattaaacgtttgattaactcatgccagcgctccctacaatacttgacgccctttgctctctatattcttcattgacaggggcgctcctccttttttgaatgcggaaaaaccttgcacgttgcgcgcaaggttcagcctgtagataacgggtttcccgcaagcgttttctatttaggataatggtgcctacttattggcatttataaggttgtttcaattgattcaaccgtcacggacccatcatcatgcatcacggtgcctattgtaatcgctgccccgtgctcaaactccttgtcaagatcacgtttttgcaattgttttgacaagtcataaatgacttcttggtgggggatgtaaacaaggatgctttgcttgttttctcctgcatagcctaaaaaggttgcgtccacaaactgggcacgttccccttcatcaggggtgtatgtaataaagaaggttgaaacttcattctcgccattttgttctgtaaagtagatgcttaaaaccatgccagtacgcacggattcaaaacttgactccaacccttcactaaggacaaaccattttggtccatactcggtttcaatggcaaagcgatttccgttaatttcgactacttggccatgattgttccattggatgatttcctgattggccgggctctcttgctggtctaaattattgctttcattctcttgttcaccagtttcatcttgtgatgttgattctgtttctgccacgccgccaccatccttttctgcctcattattggtattaactgcaaggccttccaatttatttgaataagaatcatcatttatcgtatcatttgtcgtttctgtgccgtggctactcgaatcatcctctccagcaagtgttgttgtttcttttgaatgtgtttgcttctgcgctggttccgctttgtccaacttgttatgttcagatgttgcttcgagactacctgtttcattatcggtttcgacactttcttcatatgtaggttcactggttgttttaaatccataaacattcgtttctacgtcaccatctttaagtgtatataaaaatgtacctgtattgtcggttcgcttctcgactagtgaggccagcagcattttatacgctattggcgattgcctaatggcaggagcttctaaaaaactcccatgggccgcaatggctacttgttcaacaccagttccaattgtcggtaaatcagcagaagccatagccgaactttgggagcaacctgccattccaattgctacagaggacaaaacacctgctttcgttctttccatgcgttgaacccgctttttttgtttatccgttcgggctgtttccaccctagataacgtggacattccaatcactcctcccgtattaaagtcgcctcttagtagtaggtcataacttcttctttccaccaagcaatatagcccgaaattaaaaggctttcaatagtccagagtccatagtcgtatagcccagcaagcaaaaccgctcatttcgctcggcatcagtttgaatataatgactttaattacaaaatatacctataaaactttttaattgaagtaaattaaaggaaataccaggtcctaaatacccacttaccttccacatcaacttgccatcaagcatgatcgttcaagcctaaagactcttttctgactatatctcttctttacgccagattaaagaacgtacgttcctctaaatgaaggaatttagactcattatgcacctcgttttgtgctctttttgcgcataccgctaacgtttccagaccataaaacagtctattctggcaatatattttgttacaagaaaaatccactcgcttaattcaggtatatatactcaggtcttttatcattagcgggtattttttcatggaaaatataaaaactaagtaaaaattcctgagttaaatggctatattgtgatggcagtgtctttctcatgctttaggactgcactagctttgggccgtacttttccaacagacgttgtttagacataaacacgtacatcggggaagggattttccgtgatttagtaggaaattttgacatagacagcaaaaaaattggatgttgcgataacctttttaaccccttataaaagcgatttcgaatagggtgtgcttcaaatccgagtcgttcacagcccctgtttaacatcgttacgccaataatccctttaatgtcctccacattttcttgcctctctatgtaaaaggcgagaggaggcatcgattcttttactttttgcactaaaacttttgccttttttaaatcgttatcaatagtaaatagttctttaattaagcggacattatgcaagtgaatttttacgagcacatcatttttgcaaatttcctgtccatctgccaaacaaactttcggccctttatagcgaatttgcttgattcgaaaaacggttgtattggttttcgcactttctggataatgaagccgggaaatataaaaataaattggatcaagcacactccaagtggataaaaagtatagtttaagtttcatcacgatctcctatttgccaatggggtcctttcagacattatgatgcgaaataggaaagatgaatatagatgggaaatttaggggatgatgcagccttcaaaccacctatgtttactcgcgctctagtatagcttggacaatctttacgtcatttttcaatcgccaacaaaagcctaatttctccaaagagaaattaggcttttcacctaaacaaagacagcctttttacaagctaatcgcccgtttccgctcagaagacaaataaatgccttccaacattttcattaatgctagcccatcttcggcaggagcaggagaaggagcgccagttaagcacgcttccacaaacgcatccacttgtttttggaacgcactgtcaaaatggaacgtgggatgatccaattgcggctcaatgtttaaaatcgtattttgttcttcagctacaagggttagtgctggttctagctcagcaccgcctttcgttccgaataactgcatggaaaggtggtcttttttggtatgaagggagtacgaaacgtcaaccataagcgagctgccattttcaaacgttattaaggcattggctaaatcttcaactgtattcgtggctgcatcgtagtcagctgttttatagaacgaaaggtgctcaatgttgctgcggtttccgagtttatcatagacatggcccgttactcgttcaacgtttggccgccccattaagtaccagcaacagtcaatgatgtgaacacctaagtcaataagcgggccacctccagacagctctttgttcgaaaaccacccgccaggattgccgacgcgccgcaacagtgaagcctttgcgtaataaatatcgccaagttttccgttatcaatgaacgccttcagcacttgagtatttgccccaaaacggcgaacatagccgacttgcaagatcgtgttcgcctcctgtgctgccgcttgcacttttttggcctcggcgacagtcagcgccagcggcttttctacaagaacatgctttcctgctcggagcgccgccacagccaagtctgcatgtgttttattccaagtgcatatgctgaccgcatcgacattcggatcggcaaagacatcatctgcatcggtaaatacgtttgcaacgccatagagcgccgctttttcataggcacgcccttcattgacatcacacaagccatacagctccgcgtttgcattggctgcgtacgattttatatgcatgtcagagattgtccctaaaccaattactgctacacgcattcattgctcacctcctctgccgttactttccagccgtctagtgccacttcattccacaaacgcttgacgttattcatagcgattctcgagccggtaaagcaatcttccatcccttcaaattcaacagcgatgtagccatcataatggtggacttttagtaggcggataatttctcggatcggcaattcgccgtggccgacgatggcaccgcgcaaataattgccgtttactgttcgaaaccatggcccttccccgggattctcgtagtatgggcgcacgtagaaatctttaaaatggacggtcgctgcatcaggcaaatttttacggatgccaacaagcggatcttcgtctgcacaaagaaagtttccaatatcaagtgtcgtcttaaagttgtcgcgatcaacagcgcgaagcaagcgctggacacggtcacttgactggacattgaagccgtgattttcaattgttgttgtcatgctatactgtttggcataatcagcaatcagctggcaccctcgaaccatttcctcaaagtggtcgtcaaaataatggactgtccgctgttccggcgggagcgaaaacgctgtcacgtcatggcgcaaaagcttaatgcccatatgatggacgacatcgacatgtttttggatacgttcaacttcttcctgaaaagctcgttccgtcggctggatgaaattggctggcatgcagtaggctgataactcaatccctgtttccgctgctttgtctttcaactttgtcgccaattcgtagtcatctacaaccgaaaagccataagggacgagctccatatgggtgccgccattgtcggctacccactgaagggcatccactattgtggtgcgcccatcttttaacgcttgcaacaggctgtatgaactcaatcctactttcatatgttttacacactccttcaaatgggttggtgcttcccggcaaggccgttaaacgtcgctattcactccgcgttgttttacaacaaacatttccactcccttatcaaaaacgtcaaagcattggtcccattcgtatatttcgtcaaaaatggcttaattccctgtgggaaatatttgctctccttttacacttttttgtggtttagaaatggcgctgttcatacagttgcgcatcttcgttattatttcgatatgtgcccaatagttaggcatggtagttctctttgaacagctccaattcgtttaccgtacatagcacgccgggccttttcgccattctttcacacgcttcttttgtgtcaattggccaaacaatgagctgatagccacgctccttgcactgatcggcaaaggcctctgtatagaaacgaagttccattgcaatagaggacgcctgtatttgttccatataaggaaacaatgctggcgatgcgtcacttttgattaagccaatttccaaatcgggggcaacctccctcaacgtcttcattgattcgtggttaaatgaattgacgtagacgtcattggccattcctttttcctctattaatgcggctaccttcctctctaaccggggatacatgttctcgatttgctttaactcgattgcgactttcacgcgcccttttgccaagtctaacacttcttcaagtgtcggaatccgttcgttgccgctcgtttttaaacggcgcagctcttttaatgtataggcattaattaggccagtgccattggttgtgcgatcgacggttttatcatgcataatgacaggcacttcatcacggcttaagtgaacatctacctcaatatgggaaaatccaagatctatgcttgcttcataagcggcaagtgtgttttcaggatactttgcggaatagcctctatgggcaattgcttgtacgtccatcttctttcctccctttgtcttctcatgtttatggtttaaccgcgttttcattaccctttgatggaaccaatcatgacaccttttacgaaaaaacgttgcaaaaatggatacaacaccaacattggcaagctggctacgacaacaaccgcatattttaagccttccactgttaaggcgtggttgtctaatgtcgaatcgctcacttgtaccatttcagacagttgatcttggatcagcatttcccttaagaacagttgaaggggaaaaagatttctgtccgttaaataaatcaatgcgtcaaaaaaagcattccactggctgacgccgtaaaacaaaaccatgaccgcaatcacgggctttgacaacggcaacaatatcttgattaaatattggatgttggaacagccatccaactctgccgattcccgcagttcattagggatattctggaagaatgtgcgaataataacgacattgtacaccgatactgccccaggcacgatcactgcccaaatcgtgttcaacatccctaaatcacggacgagcaaataggttggcaccattcccccgctaaagaacatcgtaaaaacaagaaaaatcgtcaacacgtttctgccataaaagtcttttcgtgatagcggataggcgaccataatcgacaaaagcaaattgaaggccgttcctaaagtcgtatagagaaaagtattgcgaaaccctatccagacgtcttcattttgaaacacgcttttataggactcgatcgttggatcgattgggaacaaccacaaatccccccttaaaatggctgctggatcgctaaacgaagcactaagcacataaacgagtggatacaaaacgattaatgtaataagcgccacacacatgtaaacggctataccaaaaaggcgatcgcctgtgctttgtttcatgtacattcctcccctaccacaaactcgtttggcttgttttctttgctgtgtaattgacaaaaatcagaataaaaaagttaatcgctgattcaaatagaccgattgctgccgaataactgtattgggcgcctgcgattcctgttcggtaaatatgggtagcgatcacgtcagatgcttccatgttgagctggttttgcattaaaaatactttttcaaaaccaacgctcacaatgctccctgtctgcaaaatcagcaagatgatgatcgtcgagcgaatccctggcaagttgacatgccaaattcgccttaagcggctagcgccgtcgattttagcggcttcgtgcagctgtgggtcaatgccggcaagagcagccaaataaatgatcgagctccaacccatttgctgccatacatcggaaaacacgtatgtcgttttaaaccattcaggcgaagtcataaaggcaatttccgaaatgcctaacaagccgagaatctggttaacgaggccattaggtgacagcagtaaaaacagcattcctacgataacgacagtcgacaagaaatggggcgcatacgtcactgtctggacaaaaccctttgcttttttataacgaatttcattaatgagcaaggcaagaataatcggaattggaaagccaatcactaagttatagaggcttaagccgatcgtatttccgatcaagcgttcaaaataaaaactttcaaaaaaacgaataaagtgttcccatccgacccacgggcttccccaaattccttcggcggcgataaaatctttaaaggcaatttgcacgccatacatagggtaatacttaaagatcaaaaaatagaccacaaccggaaggacaagcaaataaagatcccagttgcgtttgatcccgttccatcttcttttcggcggcgttttcagcggcttttttacctgttcaatgcgattttccacaaacagtaccccctaaataatgctagctgacacggcgaccgcgcctgcatgaagcgcgttttccatttcttgctttgttttaaacaatccgccggctacaattggcacggtagtcatctcaactaattcctttatgaccctcggcattaacccaggcatcgcttctactgcgtcaggcttgattttgttaaccgtttgtacagccttttccattgcttgtgtgtcaattaaaaaaacacgctgaatcgtctttaacccacattttttcgcctggataatcgattggctccttgtgctaatgatgccatcaggtgcgatcacttcggcgatgtaacgcatgccatcaggcgtgtggctttctattccagaaatcaaatcgacatggacgaacacttttttgttttgtttctggaaacaataaacttggtcaggcagcaaatgcatcttaccagtaagtaaaaaaatcgtgtccacattcgaattgcggcaccttttttcttgttggctgtctgtcagtgcatgaataaacggttgcgtaaacatacggctttacccctttattgtttgatagatctcttgaacagatgcatagacactagttgggtgatgagccgtaccgaatagctggtcttttgttgtaacgcctgaatagactaaaatggtatcgattcctaatgcattgccgatcccaatatcacttaatagcgagtcccctatgattactgcatcgtctatctttccttccattacgcgcaatagcgctttttgcatccaataagatggcttgccgactgacactgtctggtggccaaaccttggatggtctagcaatcgggccaaagagcccgtatcaattaaaaacccttttggatgcgggcaaagtaaatcttcattgagcaaaataagactcgccccgttttgaatgagccaaagtgcttcttgcaattggcggtacgtcaaatcaggcgacatgccaagcaccacagctatttgctctggcccgtttcccctttcacagtcacctatatgcaaacctagttcaaagagctcttctctaatcatgttcgaaccggccacatagagtttcctgcttgccaagccattcgagtgcacgtattcgattaagcccataacgggggtaagcaactggttatacgtaatctccagccctaacttttgcaaatcagcacttagtactttcctagagcgaacaggatggttcgttaaaaaataaacatgcttgccgttggcgcataaagcatcgactagctcctttgcccctggcaacaacatgcccccatggagcaatgtcccgtctaaatcaaagaaataatggctgtatttgtccatgcccatcctccttttttccacaacaaaaaaccctaataaacactggtacacgtagcttaggaccagcatttacaagggttttctcatcgtctccacccacatattcagtttgtacctttcccttttagtataaaaaaggaatgttaagacagagtgaatctgtcattaagatttagaggcccgctattaaacaggcacttacgagttgtccttttaaaataattgaatgcgcttcctttgtcaatgtccaatcatttaatttgcttattatttacaattttttaattgacattcgcctatgtttagcagataatatggcgtaacaacagttcatatacgggtggagtctttctggagaaaaccctaattagcgccaaaccatggcgttaattagggtttttctgcgtatatgagcgaacttaattgattgggggacatatcgttatgacgaaaaagcattgtttgttgattgccgtggccgcattaggagtagccacaacagcatgtgcagacgctggcgaagatacagcgacagaaagcgaaaacaaagacatcgttaacgaatcagggtttccgattgtgaaagagccgattgaattgacgttttttactggcaaatcagaaccaaactccaacaactttgaggaaacatatgtatggaaaacgtatgaagaaatgacagacatgaaaatcaattttgagcttgccgctttcgatggattagcggaaaaacgaaacttgctatttgcaagtggcaactaccctgatgccttttattctgccaggctgaccgcgagtgatttggcgacgtatggcgagcaaggcattttaatcccgttagatgacttaatcgaagaatatgcgcctaactttaaagcagcgttagacaaacatcccgatttacgcaaaggactaacgatgccagacggacacatttactcgttcccgtcctattacgaccccgattttttgccgatgctgattggtgtgccgctatggataaacgacgagtggcttgacgaactagggatggaacggccaacgacgacggacgcgttttatgactatttaacggcagtaaaaaacacgccagaattagctgaaggagaaataattccattttcaggaacaaatatgacagaaattcgcggacagcttcaaggggcttggggatttggcaaccggggtgttggccataaatttattgacgtcgacccagaaaatgagggggaactgcgctttttccgtaccgatccgaaatacaaagaatttctcgaatacttgaataaactatatacggaagagctgatcgatcctgaagtttacacacacgatagcgctcaactgctggcaaaaggagcagaaggacgaattggcgctgttataacgagcaacccagaaacattaatgaatcaagatcattattctggcggtgaggcgttagaaggcccacacggtgataagttgtacagccatgtcaaaccacctcttgtccatgtcggcgcattcgcgattacggacaaaaatgagcaccctgaagcgaccgtgcggtggatcgattacttctttggcgaggaaggcgctacgttttatttcatgggcaaagaaggagaaacgtacacgaaacaggaagacggctccctagaatatacggaagaaatcaccgacaaccctgatggtttgacgcaagaccaagcattggcatcgtacattacttggcttggcggcagctatcctggctatgtgcaagaacactattttaaaggctcagagtcgctgcccaattcaattgaaaatggtgaaaaagccgccgcaaatgcccctgaagaaatttggaatgcttttaactacacaagagaagagcaacaattccgcgattccgtcggcgctgaccttgaaacattcatcaacgaaacagaagacgctttcatcactggcagaaaaccactaagcgaatgggacgattatgtcgcccaagttgaagcgatgggcttggaagaatatatgtcgatccagcaagctgcctatgagcggtaccaagaagtcgattaaatgacgcctacggcggggcttaagttgtttttaatacagattgtggccaatcccgtttattgctgatcagcgaaacagttggtatgctttctttaacgaccatagctttggcaaagaaagaaggcactgatggatggaatctgaccgcacatggaaaatttggcgaacatatgggtggcgggccacacttttaatcggaacagaattctttttgacgttcagcttttttatgtttgttccttatatttcgttgtacgtcactggcgaacttggctattcccttagctttgccggtttgctgctggcgcttcgtttaacaggccagcaagggtttatgatgttcggtggttatctaggcgataaattgggctataaaacaatgatgtttattggctttgtctgcagaggcgtcggattcgctggaatgggattcgcccagtcccctgctttgctgttgtttatggcggtaattggcggtcttggaggagctttgttcagcccagcactgaaatctttattgatatacaaacaaccgaaagcgcatcataaaaagttgttctcttacgtgaacattacgggcaatgctggtacaattctcggccccttatttggcgtgttgttttcagcgcaacaatttccgctccttagcatgctttccgggctgttgtttgttctaattggttgtacattattagggctgccgatccaacaagaatcagcaaatagcgacatttcgttcttatctggattgaaacgaattgtcgccaaccagccgctgttaatgatgattgggttgatgatcccttaccattttattcaccagcaattgtttttaacataccccgtcattgcaaccaaggtaagcggcagctcaggctggatctttacacttgtcaccgtgattgtcatcacaacacaaatgaaagtaaccgcatggacataccgtttcaccgctcgccaatcgctccaagcaggttacctgatacttggaataacgtttttgccgctgcttgcctttgaacatgtcattacgcttacagtttcattgatgggtattgccttatcggttacactgatgcagcccacctttcactcctatatagtcagccaagcttcttcgcaaacgcttggtatttttctcggcttttctaatctggcgatggctgttggcggcgcgcttggcaacattactggcggcagcctctacgaatggtttgaaaccaatcgcttaggtggcttctattgggctattctcgcgctactgtcctttattgcttatgtcacagcaaaaacgcaaaaacagtaagcccgtactatagcatcttcctacagagcgagagaagatggatagaacgggcgtttttctcatatcattccatcacgtaaggcaatggcacggctaggatagtctgtcatgatcgtgcctactccttttgcaagcaactgccgtatttcttggtcttggttaactgtccaggcgcggataacggaaagcaatccttcctgctcaaaggcatttccttcggttaaaagaatcttcctgtcgacatggagcgactcgaattgaaagcagctcatgtaatcagctgccaacggcaaattgatgttaagcaaccacgcgatattagctgtgttgttgagttgtttgagccttagaagtatcggcatgtgaaaagaagaataaatgattttcgtttgacttccccaggcctggaccgtttcgagcacacggcgctcaattcctttatgttttgctaaatgtggcttcagttcaatattggcttcggtaccgaacggcgctagaaaacaaagcacttcctgtaaagtcgggatccgctcctgatcccaactcggttcatattcagggaagtggttgaaacggcagcctgcacttaatgccttaagcttacgcaacgaataatcgtgcacgtagcctgtgccatcggttgtccgatctaccgtgtcatcatggatgacgacaagctccccatctttcgtcacctgaatatccagttccactccgtctgcgccttgttcaagggctgcttgaaaacttagcagtgtgttttctggatgtgtacccattgcgccgcgatggccataaatgtttgtttttttcattcttatttttcctttccccaacgaacggatcgcttcccttgtttgattttatgaatcgccgcgtgctttattcgcttgctcaatcgccgcattcacttgtttgaccgcttcatcaaacgctgtttgcgcgtctgtgccattaaatacattttcaagtgccgtctctatgatttttcgttcttctggaatcatatccataagcgctccttgtgtggcaacagactttttcgtcgattggagttgctgcacggctgtttgcagctgaggcatgtcttcatatgcctcctgtaccacttgttcgttataagcgtcaggattgatggcaaaataaccagtaccgacatgccattcagcttgcacttctggcgtcgccaaatatttcatgaagtcccatgctgcctcttgctcggcttcctctttgccgcttgccatccataagctcgctccgccaatgactacaccttcacgctctacttcttcagcgtggggaataaaggcgacaccgacatcaaatggagcattgtcaatgacatctctagatgtggccgacgattgcataaacatggcgacttcgcctgccaaaaagccagcaaccatgttgtctgagttggtgccgtaattcataaacgtgtcttcttcaatcatccgctcaacccactcaaaaatcgagcggcctttgtcattgtcgaatgccacttcagtggcgacatcgtcacgtccgttttcattgtttaacaaatgcccgccttggttggccaacaactcttcgaatagccatccatatgcttgtaaagcaaaacctttcatgccttcattggcctcgacgatttttttgcttgcttcttcgattccttcaaatgtttctggcgggctttcagggtctaacccagccgcttcaaacgcatctttgttgtaatacataacaggggttgaagaattaaatggcatcgaataaaattggccatcaatatgatagtaattgataatattttcttctaaaccgctcatgtcatatccttcttcatcaatgaacggttgaatcggtacaatatggccgctgttaatcatcgacattgtgccgatctcctgcacttggataatggtgggcgcttcctccgtcccaccaacgctatggaattttggcaacgattcctcgtacgtgccttggaactcggcatttacgtagacttcatcctgtgactcgttataagaagagacgatttgatcaagggcaacctgtgcctgtcctcccattgagtgccaaaaagtgacaacggttttgtcgctatctcctccgcttgctccccctgaactgccacatgcggctaacatgacaagcgcggcggcgctgctaagtagaccgattccctttttcataaaaaacactccttttttcatttatttaagcgccccttcagctagtccttgctgcaatttcttctggccgagaaacagcaagatgagcgtcgggagaatcacaatgactgcccctgccatgacaacgccccactggtttaatgtttcttgcgattgcaattgctttaaaccgatttgcaccgttcggacggtgtcattagtggtggctagaagtggccacaaatacatattccaagaagttagaaacccataaatgccaagtgtgacaaggcttgtacgcgccatcggcaagacaaccgttaaataaaacttaaagtcgcccattcctaaaatttcactcgcctcttttagctcaacggggatttgtttaaacgtctgccgcaacaaaaatgtcccaaatgccatcgcaaaaaacggcaatgtcaaaccaggatacgtattgacaagccctaattcacggatcgtctggaagttcggaatgatcgacgcttcaaacggaatcatcattgtcgccacaaataaaaagaacagcgtatcccggcctttaaacgttaaaaacacaaacgcataagcagctaagcttgataaaattagttggccgaccataattgcgagcgaaacaagcaaactgttaaacaagtaattcaacagcggaaaccgttgaaacgcttgaatataattgtcgaacgtccacacagatgggatcacttttcctgtcagtgtgtctgcgcttgtcataaaactcatcaaaaatgctaaaatcgctggtgcaaatagcacaaacgcagaaacgataagaagcaaataaaagacaagctttttatgccatgtcaacgtcattggtaatgcaccttcttttcaccaagcttaaattgcacaatcgtcataagcaagatgatcgcaaacagcacaactgcttgggcacttgcgcttccatattggtaattgacaaaagcttcccgataaatggaataaacgatcaagtttgtttcattttgcggcccacccctcgtgagcatgtcaatttgcccaaatgtctgaaacgcattaatcatcgtgacagtgactacaaaaaatagcgttggcgataacatcggaatggtaatccgccttaatttgtaaaaatagctagcgccgtcaatctcggcactttcatacaagtaacggtcaatcgactgcaaaccgccgagcaaaatgagaaaggtaaagcctatattcatccaaatcgttgagacagaaactgaaaataacgcccatttcggatctgttagccaccggattgagccgacgttcagccaactaagcagctgattcaaaaacccgatgctgggatggaacaaaaacagccaaaatacagatgctgccgctactgatatgcccatcgtcgaagaaaacacaatccgaaataaaccgattccccttagccgctcgttggcgatgatagccaaaaacaaactgatcagaatcgttcctggcaccgtgtaaaccacaaataaaaatgtcgatgtgagtgattttaaaaaaagatccgatgtaaaaatacgcataaaattctctaaaccgacaaagactgttgccattccgcggttatctgtcagaaaaaaacttaaatacaacgtccgtatcattgggtaaaacagaaacacagtaaataaaaataatgaaggaaataaaaacagcatgcctttagtaaaatgcctcgtactgcgctttcctcttttcgctgtgctcgtctgttcaggtatatagacatacggttccgtcataaagcgacaacctcttgttggacattggtggttgcaggcttcaaaagcttgcctgttactgagtcaaagaaactgatatgggccaaatcaatcgcgactggtacgaggtcgccggctgtaattgcccattgcccactccacttggctgtccataactccttgccgacttcgaaaacaacaacagtctcattccctagctgttccacactagcaacaagcaatgtgacggtcggcttttctttctcaaatcggatgtgctcagagcgaatgccaatcgtcaatcgcggttctactagattgctgtctaatggctgtttgattggcaaggcaattgtctcttctatgagcagctgcccattctccgatacgaaacgggcttttcctatgttcatctttggagaaccaataaacgtagcaacaaataagttcgccggtgtgttatacaactcaattggtttgcctacttgctggatatgcccttcgtttagcaccataatacgatcgcccattgtcatcgcttcaatttggtcatgggtcacatagatcatcgttagcccgagctttcgctgcaatctccggatttcaatgcgcatatgcgcccttagtttagcgtcaagatttgagagcggctcatccatcaagcacagtggagcttcactgacaacagcgcgtgctagcgctacccgttgccgttgaccgcctgaaagttccctcggctttcgctttaacagcgtcgtaagtcccatcatctcggccgcctcttgcaaacgccgtttgccttcctctttgttcactttttttgcatgtaagccaaatagaatattttgttctacagataagtgagggtataacgcataattttggaaaaccatcgataggttgcggtctttcggggcaagcctatttgcttccctgccgtttatttttaagatcccccccgtcatttcttctagaccagctatcattctgagcaatgtgctcttgccacagccagaggggccaactagcacaaaaaattccccttgttcaatttcaaggtcaatttcatttaggacatttgtctctttgtcatatgactttgttgcattgattaattccacttgtttcatggaagcacgtttcctccttagccggaatgtacgtccatttaaccatagcttttttattaaatacggaaattaaccgaagacttacatttttttaaagaaatataaagttaatctcgctttacaaacaacgactgccaccactttttagctgttttctcccatttcctctcttaaaaatgtttacacatcatttacctcgccactggcgcctctttcatcatcatttaatgatttcaattattttttgaaaacgcttgttttttctccgcttgtctctttttttatggtagatgcgcatcaactcattcataagggagggaagctcgaaatcaaattttgatcctgttcaggttggggaaacgccatttttgagcacaaaacagcagaaaaaacttacgaaatggagcttgtatgaatatgttgcagagtattgctaaatatgaaggaggattctttccatgcatgtcgataaaccaacaccggctctgctaattactgaaatacacccagataattacgacagagacgactatgagttttttgaaatatacaacaactcttccatcagcttgtctattggaaatcgggattcgtccgctgattaccatttgctcttccgctatcctgaagatagccgtggtgatcgtccttttgaacttgaaacaatgacgatcctgcccaaacaagcacatgtattttggctgaatacgagcggacaaacccttgaggcatttaaccgcaggtacatgagccaattaagctcaagccaagtgagtgaggtgtcaggaaatatccctgctttctccaacagtgaagcacgagctgtcgtcattgttgacaacttgtcagggcaagaggtggttcaagcaggttatcaagctacagacatttccgctggttttggagttcatttcgcgctgcctcctgccgggagtacagaacaaacggttttcctgccaatgagcccagcaacccctgggtcagtctatgcggaacaatcgctgcaaacaggggccttagacacgcctattcctagagtcgtgatttcccagtacatgtacgatgcccccgctgcagacgatggcaaagaatttatcgctataaaaaacgttgaggacaaaactgttgatttaagtggattcaaaataggcgatgccctttttctcggggaaggagaaggaatggcgcaatttccagatggcactttaattcaacctggacaagagctgtttttatcccagtctagtttcatctttaaggccatttatggtgcggttccagactttgaattcccatggttcagcacaaatcgcctttacgatgaccctgatgtgccgacaatgctagatgcgaactggtccacaggcgaaatacgccttgccaataacggcgacaaactattgctcatggatcgacatgaccgtatcgttgattttgtcccttacttgcaaaatattacctaccggggaaaacagtatcgtggcgtaacagcgcgtgcggatggcaatggccaatcgattcaccgcatttccgagtctagcgatttgcggactgcttttcgcgctgggccgatccgccggccgtcaaaacggattcctgtctcaccgagcaagtcgcttttaattacggaatttatgtacacgccctattttgatgaaggcacaaacgaatatgtcgaaatcgccaatataactggcgaaacgattgatcttagcggtttttatttcggtaataaagtggaagaaaacggcgttgcgaataaagcgatgtataatttcccggaaggagcggtgcttgccccttattctgctgctttaattgcccgcaatgcccaagccgttaaaaaattatatggcgttactgctgattttgaaatggaagctaccattagcgctgtccctaagcttattccaaactgcgattggggctgcggaaacttccaaatggccaacggcggcgatgctgtcgtattgcttaaccgggataaggagcttgtcgatgccgttgttttcaagaacgccctttgtatgggcctctcttctcatcctggcgtttttgccaaaggtcactcccttgaacgggtcagcgccattgacacgaaaaaccctgcagttgattttgtggaacagccacatccaactccaggcaaactgcttttcggccctaatggcgatccgtcccttgttccgagaccttctattaaagaaaaagtgctagaagtcaatgagccaaaaacggctcttgtcgcaagccctacaatcatcgatagcgcgaccggtatgcctgacgctctgcctcccaatgttccttctattctgttcaaagcggaatggcgaaacggcaatcttgtcgctagcaatcgtggcgtactgcttgaggaggcactagatacggttacacaaaaaatgctgcccatgatcgagatcaatgagcatttccttgttccttatgtccatcaattgcttaagacgaaagggatagacgatgtctttatcctttctcgccaagcatccattattgaagcaatgcgaacatggaacaatgaataccgtggggccttgcgtctttctgggtcgacgttgcctaagaaaaaaagagacgatgccattcgtgccatccgccaatgccaatgttttacaatactagtacaagcggaagcactctctgctgaaatcattcattacttccgcagccgggcgattacaatatgggcatatgaggctaacagtgaattagcgttacaccggttagctgccattggcgtccaaggcatcgaaacgccattacctgaaaaagccgttgctactttacaagcgtaccagttggaaaatagcacaaatcaacagcctttgttaattgcccaccgtggcgtttgttccttagcgcctgaaaatacaatgcccgcaatcgaactggcagccgagttgggcattgaagcagtggaaattgacattatgatgtctaaagatggcattccagtcgtcatccacgattacacggtagacagaacgacggatggaagcggttatgtgagggatttaacactctcacagttaaagcaattgacagcgaacagaaccgataattccgactgggtggagcgttacaaactttatccagacgccaaaatcccgacacttgaagaagtgcttgtttatgccaaagaaaaagaattaatactatctatcgaaatcaaaacagacggtttggaaaaacaagtagctgatttaatccgccagtatgagatggaaccccatgtctatttaagtggtttcaaccctgttgtcatggctgcgatccaagcgcatcacccagccattggggccatgcatattttagccgggctttcacctcagggaatgactgcgctacaatttgctgaaaaaacggcgcgccacttaacaaaattagggatgtttagcatgccaggcgacggcacgatgactcaagctttgctctcctatgcaaaacaccgtggcatccctcttgtcggcggtacgagcaacagcaaagcgagcattcaagcaaagaaaaaacggggcattacgatgatctacagcgactacccgcaatggtccgaacagatgcctatttgcgtcaatcccattccgttatacaaggtcgtcaaagaaggagacgtgctgactctagctgaaatgggcgctactgtccatgaacggtatggcgtagcaagcacgctgcgcgggggcattcgcataattggtgaaaacgagggtgttgcctatacagatggcagtagcttaatggcattgaaagcaggggaaacccttttccacctttaccatgaatatgagccatttaactacgaaacagaaggcgatcctgcaaagttgccagacaaatggcgcatgtattcaaaccctgtgcggctcgttgtcttgaacaaagcagacctatcagccaaacacttagtggaagtcgtacaacgctatcgccaagaaatgactgtgatcgcttatgcttccctactgtctttatgtcaagtggcgttcctatttgaaaaatggcgagctaatcagttagcaaagcgctccattgaaaagattgaaaccgcactaatgaagtatgtggcagctggccacttaacggttgaagcatttgatgcattacaggcccatatcgcaatccttcaagaggaatggaagtaatgcaaacgtatgatacctttctgctaagcttttcgtcgtgacagacagttactaaaaccgctattgcccctatagttgccagttttactggcgtaatagactagaaaacgcacgaatgtccctttgcaaacattcgtgcgttttgtttatggggcaataatgcttttaagaagaagcaagcgtccccgcaggaccgaaaaattcataatggatttgttcttctggaacgccccagttgttcaagatgtggtaaaccgtcttcataaaaggaataggcccacaaaaataaaaatcagcgtgatgatcttcaatcatggaacggaggaattgctcatcaatatacccttccttcttcatataaggattcatctggtcttctgacgtagggcgttcatagcagacagcgtagtggacattttctttctgactcgctgtctgggctacatggtcatgcatcgcatggtaggttccatcaatggcagcatggataaacgtcaccttttgtttggttccttgctgcataagggtattaaacatgctcataagtggcgtgatgccaacgccgccgctgattaaaacgatcgggcgttcttctccctgttttaaagtaaaatcaccagcaggagcggtcatttctagtacgtcgccttcacgaatatgttgatgtaaataattggagacgacacctggagggcactcagtgttgccctcttcccgctttacggaaattcgataatatccttttcccggagcgtctgacaagctgtattggcgcatatgcgtatacgtatcaccagggatgttcacttttaccgtcatgtattggcctggctggtaagaagcgatctcatttccatctttcggctttaaataaaacgatgtaatcgccttgctctcctgcttttttttctctaccacaaaagaacgaaatccactccacccgccaggagctttgccggcctgatcgtacatttgcttttctacttcaataaacacaccggcaatgatttcatacgcctctctccacgcctcaattacatcatcggaagctgcctctcctaatacttctttcatggcggcaaggagattatcgccaacaatcggatattgttccggcttaatatttaagctgcggtgcttatgggcaatccgttttacaactggtaaaatcgcttctaaattgtcgatatgctgggcggcagcatagatcgaattggccagtgcctgaggttgcctgcctattttttgattggttcggttaaatacgtttaacagttcaggatgatggtgaaacattcgcttgtaaaaatgctttgtgatcgtttctccgtgtgcggctaaaataggaacagttgctttcaccaatcgtttcgattcttcttttaacatcacagtactcatgagtgatcgcctcacttaaaataagtattttatatatatatttaaagtatgacattcaccctcttaaatcaatatttaaaatgcatattatatgcattgttggaaattcgccacaaacgggcgcccctttcctcctacatggcaaaattatggtatgctgtagaagagatgactttctggagtgaaaaatatgcaattaacttcttatacggattactcgcttcgtctccttttgtatttagctttacaaccaaagcataaactgtccagcgtcaaacaagtagctgatatttatcgaatttcttataatcatctaacaaaagtcacccacgaactaggaaagcttggtctgattgaaacgatcaaaggacgaaacggtggcattcgcttggcaaaaaagccagaggaaatcaacattggcgaagtcgtcaaacagacagaagacaaccttgagctcgttgaatgctttaaccgcgagacaaacacctgtatattaaatcccgcttgccgattaaaaggcgtattgcatgaagcgctcgccgcctatttgcaggtgcttgagcaatatacagtcaaagatttggtgctaaacgaagacgacttacgggcattgttacaatttaaaacaacagagcagtgagatgtgaaaaagatgggtgtgccttttccataatgacaaacagcctgccggtgcaggctgtttgggtgcaacaatgcttgcggcattgcctttctacttatttgattttcactcgtcatatgcaaatcgaatattacagtgagaataggcacaagcaacatgcccattaacgatggaaggctagcccaacaagattggagttcactcatttatgatagcttttttggaatccttgtctgatttaagccacttgatcctaatattttgttcatttgttttttatagaaagctcaagaaaactaagcaggaaagaaaacgtaccccttttgaaattgtccttatgattcttatcttatttggcattttttcttgggctgtatcctttgctttattacaaacacagtagggtgattttcaccctactttttattcatgtgcaacagttcatgggtaaatgcctcgtgggcagttcactattgtaaacattttcttctttggtttcgatgtgcttctcctgcctgagccatctcatgggctttctccgattgataagacgtcttcccgctcgcatatcgtcgttcccgagaaatcgtggacggactttgcccaaggttcttggcgatctgccgaagagatagcccaagacgagtcatcgcttcaatacgtgcgcgatcaaatgtggtaagatgatggttagcagctcatggtgccctccttgatcgtttgtgtggttacgaacatcttacacgagggttccatgagctgtctttcttaaggtgttgcacttcatattccaattcgtcttttaaataagattacagccctttacaatttttagtatatttattctacttggactggccaaaggaggacgtagattgatgaacctgataccggctgaccaaattaagatcccgcagggtttgtgggaaggacttggacgattagggataacggccgacgaagtagcccgccaagcccgattgccattgaccattatgtctgagcctgctgtaacgacaactcaatactttgcaatttggcaggcttattttgaccttgcgggagaaactgcggcagccatcatcgagcttgtgaccgcctatgagactgcccaatatccaccgtcactcttggcaacctatcacgctcgcaattatcacgatgccctacatcgaatgacacagtataaacagctatgccctcccgaaaacctgcgcatcaccgaggatggcgagctgtgcgccatcgaattggagtggctttatggcggacgcgagttggctggtccgcctatgctgataggcttaactttggcatgtcttctggagcttggacgacgagggacagcaacaaacctgtctgcctatcgcgttgaattcacccaaccgatgggtgattctcggacactcgaagcttacttcggctgcccgatctgcaccaatgccacaggaaatcggctaattctccaccgaagcgatttggatcgaccgtttgtctcctataacgaagaactgctggagattttgacgcctgccttggatcgcacaatttatgaacacgacaacgtccatttcattgccgagaaggtgaagtcgatcattaagcttcgtctcgccgatggatgtcctgacattggggggaccgcgcacgagctcggaatcagtgaccgcaccttgcagcgccgacttgcggaagaacatacaagcttcaagcagttattaacgcaagctagacatgaactagctcttgcttacctggcagacccttcgcttgatattaaacaaattgcttccttgatcggatatgaagaccagaactccttttaccgcgcttttcgcatatgggaaggcgatacgccggcacattggcggttaatgcagttaggaaaaacagcgtattaacaagtttttgcctaagacttggtattttaggcccaaccatcttgccgtttggcgtattctgcaagaatgttggcggaggcggctagttactggctgatgaagacaagttatgatagtctctatccgaaacagaaggagcaatgacaagatggaaatggcattaacaaataaaacggctttagtgacaggatcgacgagaggcatcggaaaagcgattgccctggagcttgctaaagaaggggttcacgtcctcattaacggacggaaccaggaagcggtccaacaaacggtagaggagatcaaagcgaaatatccatccacctcgcctcaaaatgcagcggctgatctcactaataaagagcaaatggaaacgctatgtcagcagttcccgagcatcgacattctcgttaacaatatgggcatttatgaaatcaagcaatatgaacatgtggacgatgaagggtgggaaacgtatttccgcacaaatgtgctagcagccaacgggttggttagatgttatttgccgacaatgctgagccaaaacttcggccgaatccttttcatcgcaagcgaagaggccgtcatgccttcaggtcttatgcctcattatgccgcgactaaatcgatgctgctctcattggcaaagagcctgtccaaattaacagcaggcgccgaagtgacagtcaatactatcctgccaggtcctacgctatcgcaaaatgtagctcatatcattgaaggcatgttcatggatgaggaaccgtcgttgtccttttccgaaaaagaaaaaaaatttatggcctccaatgtgcctcactccgaaattcagcgcttcatcaggccagaagagatcggtagactcactgcttttatgtgcagccctcacgcctcagccttcaaaggctccccgattcggatggatgggggaatcgtgccgacgattttttaatgccgcaattaaccatccatgtcctttacgacattggtacaagttcttggccttagatcaggaccagaacttgtaccaataaaacaaaaaagctgctaaaacagcgactttcatttggagcatgtcacccgatctcgaccatggaagtaatatgtgtggctacctagcaattacagcgattgttgaattagctggtaacgcttcatattcttcatgtgttacctgcttatcacatcgtggaaatacaaccaaacttcatacagcagtcgatggaattagttatatccccttacgaatgctccttatactacgtatcccccggttagccattctcttttaagcaagaaaaatcttgaaggcatgtgaccgattaagattaataacccctttattaccagatttaatttttcctaaaataatttaatattgtttttttcacttcaatatcattaccataaatctcaaaaaatgaataatcaaaagcacgaatttctatttttgctaatggatgttgtaacccttcactttcttcagtttcaggtaaatggtcgaaatgccaattaatttttttccctttttcaacagctataaatactcctgactcaaattgtattaccctttttactttttctatcaattcatctgttgaaagtacagtacaacctttctgtaggttcttagggaacacctcgtgaaaagaagacttattagtacctaatacatcaaaaatgtaccaatcataactttctgtataatccttaagggatagtaaaatttcagcaaattgacaacctaaacaagaaagctcttcattaaaataatcactaccacgtatctttagtataaaagctggttcctttaagcccatgatttttctcctctaagaattattctttaaagctccatgatccatccttaaaaatagcttgatgtgaatgtgggtttacatgatcccctctaccatggtctgtcgagtattgtccgttgaatcaacttcccgtttcttccccactcaagtgtttgaatatattctcctctgaccctttttaatcccaatttgattgtgtagattcatagaatccggtttgtgagtagtgccgtttaccaatttcccatctatattttttggtaatcctaattttttgccactgctatccttaggcacgtaattaggttttaccgtacccttccccccggtcttcaccttcctcgctttcgacaagtcatatactacttctcccactttcgctggcttcgctaaaataaacgtcgttgccagggctttctccccgaacgaagcttctggggcggcgagcgtgaggaagtcactgaagaaaaagtcggctgctgcagcaatattgggaccgatgtcgtttctatacgcgatcccgtcagcgccaacacgggcatccttcgttggccctggataacgcccgtcgtcgttgtatacttcctcatcgacctcggctatgaggaaaccatcgcccagagattcgtttcgaggtacgcttggatgattgcgacttcttcctctgtaagatcatgctctcctgtggcggccacttccgaaatggccgtttgaatcgcttgggtacggagctgggcttggtaccattggtattggatcggcaccagctgtttccgttaccgtgtcaggatcgccggcgacaccgtcgcgttagcgggcaggtgcgataggcgcgcaaacaacgggaaatacgccggggtaacggcatgggtttctcccatcgctggcgctcggcacgcttgcagcgcctgttcattgcttagggtggtactggcaagcaaatggtttaattctgacttttctactcaagaaatgcaaaaattgtttactcatttttacatttattgttcttattggttgatttgattataatgggttcgttgtaaaagaacacaaaaacccaagtaacgaactttttaaagtgttcatttttcgggagcagttcattgggagcagttcattataattaaaaccacattccatgatggtataaccttcatgagttatgaatctcacataatagtttttcaatgtatacttaaacataaaactttttcttttattgattcattcattttcttatatacaagtttgtttccttatttatcacaatgagctttgtcattctcatgtgtaaatttaaatcaagtagtaagtgtagtagttatatttaaatgtcactgcagctaatctagtatgtttgctaaccatcatgagtttttgattcaaaagtcatcttgcttttacgcataaagatcttaaagtaaaaaaccttgaaaggcatatagccaatcaaggtgatttttagaaaatatcctaaaggtattaatccattccatttagacattgtttattcgaaccccatatatcggtatcaaaatcaatcataactaaaccatctcttccaattaaatcctcagcattataatcaattgaaaagttatcgaatcaagctttgttcataataccatagtgttgtttctaaaatgaagtaagtagtgacgatagaatgtctttcccctacatctactaaaactactaaaatagtcgaatttgcttgaattcgttgtttctcgcccacttaatggacgttgcttgatgctcgagcttaacatataagattaatcataaactatatatacattgctttcattactcttggcttgttctaaaaaatgtgtaatctcacgtgcaacttcaggaagcgtgggtacaatattcggagaggcatcaacggcctttacatccacgctttgtaaattaaatgatttaaacaaccgaatagtagcatcaagatttgttaattcccaaggactttcctcgtaccaaccttcatgaacgtaatattcatgcaaaataccctcattgtaagattcatactgacatattaaatctaacatggtttcaaagtaaccagtccacattttaagaacttgtctttcattggtcttttcatagacaaaagcaatttcaggctctccttcaaaccctgtatagtaggaatcattaactatttccgttttcatactttactccttccaatgcccttgatctaaaattctaacttgttctggagtagcagttcccgcttttctggcggcaattgcatcataccatttatacccctcaacccactcattttctccaatcttgaagaaggattgtggtttattcccaccactacctggaattgttctttgaattacccaagtgtttccttgatcagcaggagctccagaagttctagtgtgccatcttacttcgtatttgtatgttccgtcattccatttgtaggttatttgttcataaccaccagccattgacttagccttcatgttcgcgttttctggtacttcgattggtgctctccgtgaatactgctttgctatagctaattgttcatcagcactcatttcagagaattttttattagcattaggcgcacccttccccccagtctttaccttcctcgccttcgacaagtcatatactacttctcccactttcgctggcttcactaagataaacgtcgttgccaaggctttctccccgagcgaagcttctgggtcggcgagcgtgatgtagtcaccaaataaaaagtcgaccactccagcaacaatgggatttgtattcaacctctcctcgttaggagggttgttctcaagatacgtgttgatagctgcgacttcttgatccgtaaacatatatcctggtgtggtgactacttgcgacgtatccgtttgaatcgcttgggtacggagctgggcttggtaccactggtattggatcggaaccagctgtttcagttgccgtgtcaggattgccggcgagacggtcgcgtttgccggcaaagtcgataggcgcgcaaataacgggaaatacgccggggtaacggcatgggttgctcccatcgctggcgctcggcacgcttgcagcgcctgttcattgcttaggatggcactgacagggaaatggttcaagtaataccagttagctgctttcaggctaccgtatagaggggcgtaggcgcctgtatacagaaattctagcggcaacacgtcttggtacagatccccttcgcggctttcgatatggctttggtctagtggggccatttggagcgcttgtgtcacgacattttggtacagctcttccatattggcatcgatctccgcctgcatttctggggaagggatcacgccgccactggtccagctggctacttgactgacgacggtcgtcagttcttgcaaggtgctttttgcgcttgcgagcaccgtgtcgttggcttcgtccaagttgccaagcctttccgccgttacacggacatggtctttgccttgttgggcgtagcgaaggactggttccatcgagaacgggggcagtggcaataggtcggcgatggaagcgcgaatcgactcaatcgctgtcgcgtcttcaatcgcatagcgctcgactcgatccaggccggttttgacatcagcgagaaattcttctcgaatcagagcggagcggctttcaaagtttagcagattcgagcggatttgcttcaattgttcgatgtattggccgatgaaaagctggaacgccgtcaatacagggagatggagcgtcgcaaaatggtctttgattgcttcgcccccttcgccttgcagggaatcgaggtggatgatcttctggatgctggcctgcaagcgttcgagctgggcttgatcgtgaagctttcgttccacgatttcgtcaagtgcatcgagtacttcttgtacgtcaagtgtgttcatccgtctattcctttctgtgttatcggcggcttgccagcatctcgtccacaactccgtatgtttgaacaagttctttcgtttctgcttgtacatttttcacgacgtccaaatagcgattgaattggtcggcatacccgctttctacttccagcaatgaatggagaaaggccatcgacgacgtatggatcgcaggctcgtgatccgacacggaatagctggcctgttcctccgtttcgcttaaagcgctgagcacggagccttcgtcgattttgatttcaggcatcggttctctcctcctttcctatctcgccgcttttaacgcgattgttgttttgttttgcttgtttggaaacaagtacttgcctggtcgcacacccatttcgcttctgtctggctaaaaggctaagttatccccgaaatttacggagttcatcttgtcacctctttgggacagtattaagtttttccgcaaacactattgttcgctatcttccatcattctccatataactaacataaaacaagacgataggattttcaactatctgaaaacgagaaaaagacctgctactaaggcagggttacgttttcatgcttttggtttaattgaattacacttccagatttgtttgtcttgttaatagcaaaccagttcagttattcaataaaaccgctcgctatatttatccgcctatttctactttttcttttgattcaatttccactgtttcagcttgtgcatgacttaaacttactgtagctacaaaagcaaatgccatcaaacttgcaaccaatagtttcttcattattggcaagcccccatattttgatttagtcgtgcaacgtaagctactttaaaaaacttcaatgcagactcaaaatctcctcttttttctgcatagttacctgcttcttcagcaatatcggatacctcataaaataatcctcttaactctagtttttcaattgcttgatccactagagccatattttcatcgatataaagccctctagtcgaaggcaacgagcttgatattcgatgtttttatagtaagaggctcccaagaccttcttctttttttccttgtcttaacaaaacattacctaagttatattgggattttgctccaacttgatggtttgcatgctccttaattgataaagctaattgcaaactgtcttctgcttcgtaataacgttcatttcttatgtgatcaagcgcaattaccctataaattaatcccctacaacaggatacttatctgactcacttaatgcttctttcagtcttacttgagccttttgtgaatgacccaattctgaatcaatgcctgctaaaacgatttgtccattcaaataagattcttcgtagtttagtcttttgaaaatccgataagcttcttccatgtaggatgctgccacaggatactgatttaaacgataaaaaagcacccctgcatacatggagaattcagcttcctcggcatcgtcatgcaaacaagctaaaaattcttcagcttttcgcaatagcttaatcgctgagcggtagcgctcgtggacatattccttttgggcgcttacgaaataataaaaatagttcagtgtacgatcaagtgacgattccgccaactctccgatttctgctagtttagccgaatgctcttctacttttttaaactgggtggcaaggatgtcatggcgaaaactaactagtgagtagtggaaaataatagacaaatccgatatttcccaagtaggaaaacatgttgggaaaatgctgagcagcccctctacaaatgcttattcaacaacattcgcaaacaacgccgctattcctaaccctcctgctgcaccaatggcgctcaagccaaacttggcatcacggcgtttcatttcggatgctagacggcaaacgtttatcgccccagatgccccgtacgggtgccctatggctaaagcgccgccgctgacatttagtttttctttgtctaggccaagctcttgttggagcgctaccatctgaaccgcgtacgcctcgttcaactcaatcaaatcaatgtctgatagattccgtttttgttttgccaacagtttgcggatcgcaggcactgggctcatacttgcaaagtggggatcgtagcctgctcttgcagcatcgacaaatgcaagcatcggtttcatacggtaacgcacgcacgcttgctttgacatgagcaatacgagagccgctccatccgattttgcgcatgagttggctgctgttacggtccctccgttgtaaagcggcggcactcgttttaaaagccgatcgggcatttgccgaatgccttcatcagcaagatcacggtgtgctgcaattttttcgtcacgaaaaaggccctgttgttctgctgcccatgcgcgcctgtaactctcagcggtgtactcgtcctgtgcatcccggccaattttcctttgttcagccacattctctgccgcttcagccatatcggggtcccctagcgattccggcgagaagcgggcacgttcgattgtctcgtgccactctcgtctatttccgttcatgttaacggcaatccgtttcggctcaagacttgtgctttctacgccgccggccaaatagacatcgccatctcctgcttgtatatgccttgccgcaacgatgatcgcttctaatccagaaccacattggacatcgaccgttacccctggcacgtcaacaggcagaccgctttctaacaacgagaggcgtgctatatttcccccttcgccaacagcgttgccaagcaccactccatcaatctcaggaaaaggaaggccagcaacgatttcttttatgacagaggcggctaacacttctggacgctgcgtggctagaatgccgccaattttgccaacagctgtccgttttgcccttacgatgaacacatcactcataacggccactccttaatgcttggcggtccacttttccgctcggcaaaagtggaaacgcctctacaaggtggagacgccgtggacgtttaatcggaggcagcacctcttttaggcgtgtacgaatctgctttttgtcttcttgcgacaaataccggccttttatgtaaagttccatttggctgccccaatagggatgggccttgccgatcgcaatcgcttcttcaacgccttcgatctcttttgccaactgttccacttcctcagggtagacattgatgccgccaatgatgagcatattgccttttcgcccttttacgtgaacaacccctgttttgtcaataaagccaatgtcgccaaccgtttcccactcttttacaggcgcccctcctttgtagccagcaaacaaataagggctctttatatgcaacatcccttcatcgtccgcttggatcgtcacccctggaaatggccgccctactgccgtcggaggaagagtgctttggctacggtggtgcaaactagaaataaaacttagctcagaagcaccataaaattcatacagctttgcgtttggaaactgtgtttgcgcccggccaacctggattttcgaccattttgcccctgacacaatgatggtatcgacttgctcaagagtctcgttgctgcttgccttcacaaatgcttcaatcattgtgggtacaccataaatcacatcgacttgctcaccctttatcgtttctaaaacgtcaaacggcgaaaacgtcggttccaaataaagagtcgcccccatatggagcgtatggacagcggcaaacaaaaacagtgagtggaacagtgaaccaggcacactcactcggtttgtgctttgcagctgaaacgtttctgccgctggttggaaacttgttgtccatgagtgatgcgtacggacatacgcttttggcgctcctgtgctgccagaggtaaaccctaggtaaaagagatcgttcccttgggcgaatcgatctgcctctatttcagtcgtttcattgacctgtctgctgtcccacactgcacattcggcttcggaaatgggcctatccgtaaagagcacatctgcttcagcacgcgctaatgcctgcaaacgttcattgtttgtccattttctgtttaacggaatgcctgtccaccctaagcttgctgctgccaaaaacacaagcaatagctcatcttggttttcaatgtcaatggcaaaagcaagcgggcgaacgaacccacattcctttgctttagccgacaaggcgtttcgatagctgtgcaagtctgtctccacgtcacgatacgtacgtgtccggtctttatagaccaatgcggttttatgaggcagcatgcctccatttttcaaaatctgatcggcgatatgcacgtacgttccacctctttgtccattgaatggtgccatcgtaggcgatcgtgacaaaattgtcaaccgatagatcattgacgtttacataaataaaaggaaaagcaaaatttcccttgtttatcatcaagggtagagacagtactctattaatgtacaataaaaagacggtacaccgctgtaccgtcatcaaatcaagcttatcaactttaccgtcttcctcctataaaaaacggctttgattgaacagttccttccgcaaagcacgttttagaaatttgccgactgatgttttcggcaatgcctccatgaagacgacgtcgtcaggcagccaccatttggcaaactgtggtttcaaatagtcgacaatttcttcttttgtcgcctgtttgtcattttttaatacaacgcaagcgactgggcgttcttgccacttatcatggggcacagcgaccactgctgcttcgagtacagcttcgtgagacataatcgcattttccaaatcaacggaagaaatccattccccgccacttttgattaaatccttcgtgcgatcaacgatcttaatggctccctcctcgtcaatcgtgactacatctccagtatggaaccaaccgtctttgaatgcttctgtactccgttcatcgtgaaaataacggtcggcaacccaagggcctcggatgagcaactcgcccatttcttctccattccaagggatctccccattggcgttcacgcctttgatgtcgattaacggaacggccattccttgttttgccttcgcttgatattgctcgcctttgccccactttttctggtggctttttaaacgggaaaacgatacgagcggggccgtttccgttaagccataggcatggtaaaacgggacgttcaacttacgttcaaatcgctcgatcatgctttgcggtgccgcagaaccaccacaaatgacagcacgcaagctgcttaaatcataatgatgatgttcaagtacttgcaagaggccgagccagacagtcggcacgccgccggtaaaggtaacccgttctttttcgatcaactcagcaaggagctgaggggtaaatgctggacctggcaacacttgtgtcgctccatagaacgtagcactaaacggcaagccccaagcatttacatgaaacattggcactacgggcatgcacacgtcgttttcgctaattgccgtcgtgtctacatgcccctgcactaaactatgaagaacaatgccacgatgggaatactcgacccctttaggcatccccgttgttgccgatgtgtaacacatcgctgcctgttcattttcatcaatgtcatcgcaaaacgcaaaacagtcatccccctctgcaagcaacgcttcataagaatagagcggttccagtgtggacgaaggcaactgatctttgtcagtcatcactacaaacgcatgcaccgtctccagttgaggcctaatcgcttctacgagcggcagcacatcttcatcaatcagcaaaatccggtcgcttgcatggttaatcacaaaggcgagatgatcaggcggcaaacgcatattaatcatgtggaggacgctccctataccaggtgcagcaaaatatgcttccaaatggcgatggtggttccaagcgatcgtccccacccgttccccccgttttaaccctagtttcgtcagtgcgctcgcaagtgctcttgtgcgtttgccgatttctgcatacgtataccggtagatgttgtcatgcgttcgtgataccactgttttgtttggaaaatagcgctctgcccgttccaacatcgacgaaatcgttaaaggcgtgttcatcatcggcaattcctcctaaatgattataagatgaggacaagtcttgattctaaagcgcttacatttaatatgaccatacttgatttttttgtcaaaagcaatctgttcgatgtatagattcatgtcgttttttacgatatgaactaaaaattatgagacatgtaatttttgaacacctgctaatttataaaaagggatttacgtacggtggtaatgaggtgattttcgatagtctactaatacttttattgggttggttcgccctttgtttaaatggcgaagcattggtaaatgtaaattagaaacttctagggaagactgtttaatagtcaattagcaaagttggctccgaaatacacaaagaaagcaattatagcaattcctgcaaaggctatgaacgaagctatgattggtattaccttgttctctgtctttgaacaaaaacaaattactgctaagacaaatatagcaaatatacttaagggtatgaaagaaccatatagttttaacgtgaattgattaacatattgcgaaataaagtccaacaacagaatacttaggacaaggagtacactaataataagaatactataagaccgccaagtaattcttttcattttttccttcctcttaaaatcccttattgtcaaaacttctatagtaaaaagttaatcattcgttcatttataggggtttaaatgccaaaaacttgctacccccatcgttatagattaaaagtgaggttaccacgcgcacaaacttgtaccctcaattatgtactaagatcagatgatccgtaccctgcaaactcttctcatcggtaaaaacatgtttgagaagctaatcgcacatccggccataatttttgaaaaaaatagaattaccttccctttcatacccactttcagaagaaataaacctgtttttgcaaaaaatttttcgttttctacttccactatgtatatgacaaattaaaaaagacaatagaagctttgttccattgtccttatgacgcttccctaggcctattccttaccaagtttactttaaatctctatctctgtagtttgtgagtggcagcgttttttagttaggcatgaacggccaatcgttcatgccgttcattagcgcttacttcaatccgattgccggcttcatcaaaaaagtgaagatgctctggcggaatcgagagatcgactttttgcccagttgtataagattctgtccctgccacgacttggatagtgacgccattgatggtgaggtaatggacatagcgtgaaccaatgtattccttgcgaacatattccccgtgaaggacacacgcttctgggagcttcttaaacataatgtgctcgggccttacacctatttctgtaactccgggaatcatcgccctgtcggcaaatgcatcagctggcagcatattcattggcggcgtgccgataaaagtggcgacaaatcgtgttttgggcttttcgtaaatgtcttcaggcgtcccaatttgttcgataacaccgccattcatcacggcgatccgctgtccaattgtcattgcctctaattggtcgtgcgtgacatagaccatcgtttgtttcaagcggttatgaagttcaattaagtcattgcgtgcggacacacgcaaaagcgcatcaagattggacaatggttcatccaacaggaaaaacggcgcttgtttaacgaccgctcgggcaagggcgacccgttgacgttggccgccggaaagttcggcaggtttgcgccctaaatacggctttaattcgaccagtccggcggcatattcaactgcttcgcgtatgtcttgctttttctttttgcgaatcgtgagcgaaaaagcgatgttatcaaacacggtcatatggggataaagggcatagttttggaaaaccattgccacattgcgatcggcaacgtcaacccctgccattgcttgcccgcccattaaaatcgtgcctgacgtaggctgttccagacccgcgatcagtcgcaacaatgtcgacttgccgcatccagaaggcccaagaagcacaaggcgttcgccgctgttaatcattaaatccattggcggaatgacatttgtctgcccaaagtttttctctacttgtgtaaacacaatgcttttatcttctgtcatcgctacttcacccctgtatgcaaaaagctgctcataatatgtcgctgcaacaacaaatacacagcgagtggcgggacagacgcaagaaatgcgacagccatcatcggcccccacgatgtgcccccttctgcacttataaattcttgcaaagccagaggcatcgtcatcaagtcgttgtcgttaatcattagtaacggccataaatattcgttccatgtcgtaataaaaaagagaatgcctagagcaatcaccgatggcttaaccgacgggaataaaattttccaaagcctgcgccaatcccctgccccgtccacgcgagcagattcaattaggctggcaggaacagaccgaaacgattgccttaacaggaaaacgccgatcccatttgcgatttgcggcactattaaaccgaaataggtatttacaagctctaaatcacttaacagaatatagtttggcagcatcgtcacttgaataggaatgaagatgctcgcaataaccaagtaaaagcaaaactctcttccacggaattgaaattgagtaaacccgtaagcagcaaggatgctagtgaacagttgtatcaatgtaaccactgttgcgacgaagaaagagttgcccatatagcgtaaaatcgggatcgactcccacacttggctaaaatggtctaatgtaggcggaatcggcaataattgcaaaccacctgcaaacaactggcttgtttcaagaaaagcggttgccgccattgtcaaaaccggaaaaaaactaaggaccaggcaaatcgccaataacaaatgccatccgttaactttcataatggaccctccgatcaagcactttagcctgaagcaaaatgatcagaacaaaaaacaaaaacgttaacacggcagttgctgacccaagtcctgtgcgaaaaaactggaacccatactgatacgttaagaacaccaaattgcttgttgattggtctgggccgccattggttagcatttgaatcggcacaaaagcaaattggatgcccattacggtcgttaacacaaatacgaacaaaattgttggtcctgtaagcggaaaaacaatccggcgcaacatgccaagtttgcttttcattccttctacacgggccgattccttcacttcttcagggacacttaaaattccagcaagcaacacaataaagtgatagccaaacgtattccaggccacgacaagcgtaatcgcaaacagcgcccaattggcatcatttagccagttgacatcgggaagttgaaagaaacggagaatttcattcactgagccaatcaatggattgtataaccataagaagatgacagacgcaaccgcaagggacagcacgtgcggtacaaaaagagcgccacgataaaaatgttgccaccgccctgaaacttgcgtgactccgtaggctgtcatgtaaggaacaaacaagattaggacgagcagcatgcccatgtaccatagcgtattcgctgatgcgtttaaaaactcgcgatttgaaaacaattcgacgtaattgtctaaaccgacccatgttttggttggactaaccatattccattctaaaaagctccaataaatcgagcgaactagaggaacgaaaataaagagaacaatcggcagcatcgcaggagcgataaacaaaagcggctttatccgctgcagccaaccgcttgctggtttcatcttcatacgtttatcttcccaaccacttttcctgcttgtaaaagctcgttgccgtggcgcttcaacacttctagtgatgctgactcgtcatattctaaaattaatcgcagagagtgtgtttgctcggcaacggcctgccaaatctcattccagcgtgtcactcctgcgccaattggcaaatgcaagtcattttcgccgtcattatcatgcaaatgaagagcagacagccttgtccctagcgcttcaatcacatttgctatatcccaattgttaattgtggcatggccgacatcaagcaatgcttgaatcgccggaatttcctcgaacaattggacaaattcccgttcatcaaatagcatcttatcgtgaaaaccgacattttcaaccaatagcatgatgcccttttgttcagcgatatcaccgagctgttttatgtaatgcttcgataaagcttgtgcttcttctcggtgaaacaaaggcatgttgtatagatgagtgtggagcacagcatggcttgcaaatgtagaagcccattctaagtacgtacggtatgcttcaaaggaataggccgcatattgagggaactggacagaggccaagtttaattcccaaattggcaagtggacgccaatgtctcctgcataggaagcaaaccgctctttctcctgagcccaatcggtatcgccatgccaatgggggccgtctgtcgagatttcaactccgccaccccaatcctgtaaaaaagctggggcatcgttaatttttttcataaaaggaagcaagttgatatatacactcattgtatgtccgcctctcgcttattgaatatatccattaatttttgattctgtttctttcaaaaccgattccgcatcggcaccgtcaaaaatttgatcccttgcatctagaatcgcttgctctgcctgcaaaccatttgcacccggaaagttgatccaagggacaatcgattccatttgccgattagcggtttgcatgatcggattttcgtcaaaaaaaggacctaacgtatctggatcttctgccagtcccttgaccggcggtagataaccagtcccttcaacccaaatttccatggcttctgggcttgataaatacttcataaattcccacgccgctgcctgtttctctggatcctgtgaaaatgagaacagcgcattcccgccagcagctacttggcgctctttatccccaaaggttggaatttcgacggaacgcaaatcaaagttgctttgttcttcaatcgcagcccggcggcctacggttgtcatcatcatcccgacttttcctgtggcaaatgcctgtatgccttcttcccacgtcacatggagggcatgttggtcttcaatcatgcgtccaagcatatcaaacacttccacactttccggggaaccgatggttgatacaacttcgtcgctactaaaatcgaggaaatccccgccatttgaacgaacaagtgagtactccgcccagctatctgggggctgttgaacatagaggccgtactcccctgtattttcctttaccattttggccatttcctgcatctcatcccatgtttgcggcagctcgtctacattccagccagcttcttttagcaaatctgcattgacatacataattggattgcttaaggcataaggcaatccagccaatgtttctttatcgttggaatacccaagcgctttaatattgtcgagataagattcgtttaaaaacgcttccccctcttcatcattagccgctagttcggacacagggacataaggcacgttttggtcgacataagctatgtagttgtagccaatttgcgcgacatcaggtggattccctccacttagcgccgcctgggcattttgcaacagcccttgataatttccaggctgaaaagattcctttacttcaattcgatcctgggaagcattaaactgttcgaccagctctttaattgctttgccgccccagtcttcgttgtttacatgccaatactcaatcgtgactttctcttcactcgtggttgccccttccgtgccgccacaagctgctaaaacagtgaccgtgcctagtgtcgataacaaggctgcatgtttcttccacacagtctctccacccctttgttggttaaatacatgtctagtataaagacaggctattaatttctaatgagagggaagcaaatattttgtaaaacgtttgtaaaggaagcggacaaaaaaaagacaaagagccattgccctttgtcgatttcattctttttcccgctctatgagtttaaaggcttcatatgttctggaagaggataggcaccgtcttcgtcatgaacttcttcgccagtaacgggtggattaaacacacagaccatgcgcatatccgtcttcgcccgcagtaagtgctcatcatttttgtcgagcacataacattcgtattgcttgacgggccatacttttccatcttttaccgtctccacttcgccttccccttcaatcacgtaaaccgattcaagatggtatttgtaccaaagatgcgtttctgtgccagctttaatttgcgtgtcatgcaaagaataacccatacagtctgactcgacaacaatccgctggctccgccaattgccgccgtctacatcccggttcgtgccaataatgtctgccagtttgactactttcattttctctcctccaatgattaagtaactaacgcttgtttaagtggtgacaggctcttttacgccaaggacggcgcgtacactttcttctataatggcaaagcctttttctaagtcctcatctgaaatggtgagcggcgggaacagcttaaagacttcatcttctggaccggccgtttccatgattaagccgcgcttaaatgcttcagccgctacttttccagctaggccgtctacttttgaaccgattccagccataaagccccttccttttacacaaccatccatttctggatatgagtcaacaagtttcgttaagaaagcatggattttctttgacttgtctttaatcgcttgttcaaacgatgggtcttcccagtaggacaatgctgccgttgctgtaataaaggcgtggttgtttccacggaatgtgccattatgctcgcccggagcccaaatatcaagttcaggtttgaaaagggtgagagctaatggcaatccatacccgccaattgatttagacaggcagacaatgtcaggcgtaatacctgcttcctcgaagctaaaaaacgtccctgtgcgtccaattcccgcctgaacatcatcaataatcattaaaatgtcgtatttcttgcaaatgcgctctaattgctgtaaccattccatacgtgcggcattaatgccgccctctccttgaacagtttcgagaatgacggccgccggaatgtctactccagagccattgtcatgtaaaaactgttcgagataacgaagtgtatcgacttcttcgtctccaaatttgtcatacggcatcgttacaacattagtcaaagggatgcctgcaccttttcgtttagaagcattccctgttaccgaaagcgacccgattgtcattccgtggaagccatttgtaaaactgatgatttctgttctccctgtcaccttgcgagccagcttcagggctgattcaactgtatttgtgcctgttggaccaggaaacatcactttgtaattgagctttcgtggctttaaaatcacttcgttcaatttttttaggaatgctgcttttggctttgttgccatatcaagtgagtgggtaattccgtcatcggcaatataatcgataagagcacgcttcattttttcatcattgtggccataattgagcgcccctgctccagcaaagaagtcgatgtattccgttccgtcctcatcccacattttccagccttttgccttcgtgaaaacagccgggaagctgcggcagtaactacgcacttctgattccaattcattgaaaatgctcattgtttcattcactgtctgttgttcctccttcattttttcgtttaagaacgaagtggtccaatgcgaaacgtgttttcttgttcatggctatctccaggaaataactgttccgaaaaacaactagacacttggcagtctgtttgatggcttcgggctaatttcctgaataacgcttgcgaagctttgttcgaaggtgttaccgttgcttccacgtaacggatatccttgcatgcctctcgctcaatcagcttattgatcaagtcaaggccgagccctcgcccccgttgggatgctgctaccccgatttgccaaataaacaacgtatcttgctgtttaggaggaataaaagcggtaataaatcctactacttcgtcgccatcttttgccacaatacatgtatcgtcaaaatattcgcacatcataatgtacttgtaggacgagtttgtatcgagcgaagacgatttcgccagttgccacatggccgcgccatcttccacggttggctttgttaacgttagtactggtgtctggaccataacagcctccttttcgtttattatttcgtttttgccagacactgtttccttacccgtctctcatcattctaaacgttcgtttttgaaaaattttatgaaagaacataggcaactttctttgccttctataatgataggggggcgtggcaacaaatgcaaacgcttaatcgttggatataattggattgatgtggctgagtcgtgctaagtcgagcagagagtaggctccttttcatatcctccttaaaagtcacgtttccttccatattcgccttttgcttatgaaaaacaaaaaaaggagggttccccctcctttcagccagtcgccaagggctcgcatacgtcgtcgtttggctggactatgctaactaaccctcgacctattcccattttttctcgtctacattttaaatcaatttgattgatgttactgtcacacgcactgaaatgaagcaattcgctcagtgtcaatgccaaagaatacccaacggaagaaaaaccaacgccagcctgctacagagcgccggcctacaaaagtagggtaaaaccaaaacgattcgccgttatttaggcggataaacgtataacgaaacaggcagcctgcgatcgctccaggatcaacagcaaaaacagaaggcgcccctaaagtgcttaaagcagcttgggaaggaggcgggccaggcggcgcccccgttccttgacctgtggaagtcgtcggggggcctccctggcctgggaaaaaccctccttgtgtgggcgggggtccaggtgggccaccttgtgttggcggaaatggaaacgtgcctgggctaaagcgcattgggtaatcatgcccattgtacataaacgagcaactcctttttataacctttttgctagcctacgcaactgcccatggaatggtgaacaatatccattttttgtgtatagcatcgtcttaattcctaatactaattggaaactaacaacagataaggaagaaatggcatgaggacaacggatcaaaatgcatgtgctgcggccattaaaagtgctttttaccaatcaaacagcgtgcaaacactggaaattccgattttagagacagaccaagcgcttgtgctattcattcaagagattgtcgaccaaaataagttgcatgcgttaatcgttgatccccttactcgtttccgtctcgcaaagcagtcatacccgactgaatctgttacgacttggctgaaagacggcaccccgctaccaaatgccactgtggaacaaataaaacgggaaatgatgaacggccaagcagttgtattgttgaaaaacgaacagcctgttttaatcgattgcgcgatgtggaatgtccgcagcgtcagcgtgccccttacaagcagcgtgtatgaagggccagcatcggctttgacggaaagccttgacgttaacatgaatttgctccgtaattattttcgtagcccggaattagcgatcgaaacattagaagtcggagaaaacgctgcaaaaaaaatggcgattgtctcgcttcacggaaaaacgaatccagaccttgtcaaagaagtccgcgaaaggcttaaacaagtgcatgtagccgaattcatcatttcgcaaattgcaactgacgcgctcgaagggaaagggtttctgttccctcggacaatggcgaacgaccgcccagatgcgtgcgcattggcattggcaaaagggaaaattgtcttgctcgtagaaggatcgccattggcgattctggcaccaagcctgttttttcatttcttccaaaaccaagacgattacttatccgaatttggccgctttggcgcacgtcctcttcggtatttgtatttttttattgccaccttttttccagctattactgtagcgatcatccgttttcatctcggtcacataccgacggaagtggctaaccagcttgtgaaaacccatgaaacccttgccccctatacaatcgagcttgtctttgtcattcttttattgcagcttattatggatggctcctatcgcttgcctggcaatacgatttttgcagtgacgtttatcggcacaatgctcattagcgatattgctacaaatgttagcctattccatccgattaccatcgtcgtcattggcgtttgttatataactagttttcctgtattaaaccgcgggctgctttctccgattttttttattcgcataacgttgattatcgtagcccatttctttggctttgcaggaatgtttgctgtgacaaccgccgtcatcatccatatggcccatttaaggtcccttggcattccatatctctatccgtttattccgtttcagcctgataaatggcatgacacgattttccgccctactttgacgatggccatcaacaaaccgacgccgctgccttttaaaaaagcagaggctgcccagaatcgaagaggcagctactgaggaacgagatgaattaattgtgggatgaggcgaatctcaaagcatcgcctttttttaaataacatatgattaaaccacccattcccgcggaggaatgggtggttctctttaaagttgcaacgatatatatttcacttctacatattcttcaatgccccaatggccaccttcacggcctaggccgctttctttcatgccgccgaatggcgcttgggcgaccgaaggcaaaccatcattcagcccgacaatgccgtattcaagcctttccgcaatcgtaacagcttccgataggtcatttgaatacacatatgctgctaaaccgtaaggggaatggttggccctttcaatcacgtcttccgttgacgtgtacgtggcaatcggcgcaagcggtccaaatgtttcttccttcatgcaaagcatgtcatcggtcgcattggcaataagggcaggcgtttggaagtagccctttgtggcatcggcttcttggccaaagatcacttcgcctccttttgcctgtgcatcctcaatatgcttttgcacttttgcaaccgctgcttcgttaataagagggccaatgtggctgtctggttccatgccgttgcctacttttagctgtttcatttcagcagcaaaagcctctacaaaaggcgcttttatcgactcgtggacgtaaatgcggtttgcacagacgcatgtctgtccgccattgcggtactttgaagcaatgagaccgtctactgccttttgaatatcagcctgtgcagttacgataaaaggagcgtgaccgcctaattcgagcgacagttttttgacagtatcggctgcctgccgcatcagcagtttgccgacacgagttgaaccagtaaatgacacttttcgcacccgttcatcggccatccacgtttccccaatttgttgggcgtctcctgtaatcatattaacgacaccctttggaatgcctgctactttagccaattccacgatccggtaagcagtaaatggcgttaactctgatggtttcataacggctgtacaacctgctgccaaagcaggccctagcttcctcgttaacatggcagcgggaaaattccatggcgtaatcgcagcgataacaccaatggcttgcttttgcacaaatatacgcttattggttgctgccgcagggaccgtttcgccataaacacgtttcccttcttctgcataccaagacaagaaactgttggcatagcggacttcaccaagggcttctgcaaaaggcttcccttgttctagtgtcattaacttggcaatttcttcttcctcccgttgaattaactcgtaccacttttgcaagtacgcgcctcgttctgctgccgtttttgctcgccattctggcaatgccgccgccgcagcgtcgactgctgctaaagcttcctgttttcccccatttgcaacggtgccaatcacttcttttgtcgcgggattttctacttcgatcatgtcgtctgtcgctacacactcattgttgataaacagtgcatgattcatcacaagctcactccttttcatgttcgaaaaacaccatttccgttttttactgcacacactacactcaccgccctgcccatgctcgttcataaatcgacaaaatggtatcacgctcaagcggacgggggttgttctttaagagccgatcgattttgcttgcatcttctgccatagccgtaaggtctgcacgtcttatgccaaactctctaaggttgcttggaatatggacttgatcacaaagacgctccatggcgcttatcgcctggtcagccccttcactcgatcccatccctatctcctttacgcctaacacttctgcgataacagcaagccggtcgacgcaggcaactttgttctccctcattacatagggcaacagcacggcgttactgacaccatgggccatgttaaaccttcccccaagaggataagcgagggcatggacagcgccaactccggcgttgccgaatgccatgccagccattaagctggcaacggccatttcttcccgtgctgcgagggttgttggctttgcgtatgcttccggtaaattccgggcaattttttcaattgcctgaagagcgaaagcatctgtaaggggcgatgcatttacagataagtacgcttcaattccatggacaagggcgtctatgccgctcgcagctgtaacagcaggaggggttgtcctcgataattctggagaaacgattgccacatcaggaagcaaatggtcactaaccatccctttttttagcttagcgtcattgtcggacagaattgcaatattcgttacctcggagcctgttcccgctgtggtcggaatggcaatgagtgggaccccttttgtaggaactaaatcagtgccaatcaaatcagcaagtgcaccgttataacgaacgtaagccgccgtcgctttcgctgtatcaagggcactgccgcctcctatggcaatcacgccatcatggccgccagcgacaaaagtttgtttgcacgcttccacaactgaaaatgctggttctggctccacttctaaaaatatgccataactacgcccagcaagtgccactgttacttcctcaagcagcccggccttcttaatcattttatcagttacgacaagggggtggttcatttttaaccttgctatttcactacctaaatgggaaatcgctcctacgcccgtcataattttgtaagcgcttttaaaaatgtgcaccattttattgcctccttgtttcaacattttagcagaacatccctttttctggggagggcaccgcctttttttactctttcacactattaattgagcacaactgcgtttttattggtctgtgcacagcttaaaacatgctgagtgaataacgtttggccatcatttccagcaatttgatcccggcaatggagttgcctttttcatcgagagacggcccacaaatgccaatcccgcattttttcggtacggcccccataattccgcctgacactccgcttttggctggaatgccgacattgatggcaaattcacctgaagcattgtacatgccacatgtgaccataaatgttttgcatattcgggcaacgtctataggcaaaagctgtttgcctgtgtcaggatcgcatccgtccatggccaaaacacaaccgaccctcgctaaatcgatacaattcatttcaatcgcacattgttttgtgtaaaggtccataagctcttctacatcttcatcaatgacgccatgctccttcataaaataaacaagcgccctgtttaaatgggctgtttcaaattctgatttggcgatttctttgttatacgtaatggtctcatttcctgtcaaacaacggataaagtccaataaacgttcaaaccgctcccctgctgtgtttcctttaatcatatgagtaacggcaagagccccggcattaatcattgggttgagcggtttggaaggcttgttggtctccaatttagcgattgaattaaaagggtcgcctgtcggttcttttccaacacgggtgaacacgcattcttccccttgatcgataagcgccaacgctaaggaaagcacttttgaaatgctttggagcgtgaaattttcttccgtatccccagccataaatcctttaccatcaggataatacaaggctaccgacagctcatgtttatgagcagcagctaaagcaggtatatattgagccacttctccttgcccagcaaacgctcttgcctggctaatgagcaattccagttcatcatttgaacggcatagcatgcgaatctcgcctctcttttttcggtctctttcattagcttggctgctttggcggaatgcatacaaaaaaccgtttcctttccaaatccgtgttccttcactactgacaatcacttcgtttaagcggtgaaaatcaaacaaacgcccccttatataaaaacagcacctgcaattgatcgacgctgtctttcaattgcggtgcagtttaggattaaaaaaacgtgtagagcgcgacggcaatggcaagtgcgacagtcggtaaaagggtgcacactaagaaaataggcccatatgctcgtttatgggtttctccgcatatagctcgaatcgtcgtgacgacaaaaccgttatgaggcagtgagtctagcccacccgaagctagcgcggaaatacggtgcatcgctcctgggtctacgcccctttccatataatcaggggcaatgagcggcaaagcaatgccgaggccgcccgatgcagatccggtaattccgcaaatgactgtgacaaacaaagctaggctaacgaacggttggcctgctgcattcaataatgcttgtaaaaacaaatcaaaagcaggcacttgcgcagcgacactgccaaagccgacaacagcacatgtattggcaattgcgacaagagcattttgggcgcctacggcgagtgactctccgacttgcgttacaaatttcaaattaaacagccatgtcgttccgatgccaagaagcagcgcgaccaatacagccgttttggcggctatataaagcgacagcacatttaaagaaacaagcacaatcactaacggcaacaacgcaaacaatggctttggcaataggcgctcttttgccgccgccagttcatcaagcgcttttccctctagcccgtatagagggctgtcttttgggagcgaaaaacgctcgccttttttcagcgctgccctcaacatatgcctgacccaaaggccgcctgcaatcataataaagaccgcaattacaacaccaatccagccaccagcagttggttgtgtgccaaaaaactcggttggaataatgttttggatttcaggtgagccaggtgaagtcattgtgaacgaaatggaaccgaatacgatggcaaccggtataaaacggtgcgggtaatcggcgagcttaaataaggatacagcaattgggtaaacggtaaaaccaaccacaaataaactgacgcctccgtaagtcataatcgcacatgcggctattaccgcaaacagcgcccactttgcgcctaatttccgctcaatccaatcggcaattgcttccgcggcttttgtgtcctgaatgactttgccaaaaatcgcgcctaatagaaaaaccaaaaaccaagaagcaaaatagtttgtaaacccctccatatagtagccgcccattgccgcgtttaagttaagccctccagttaaagcaagaagaacagaagaaagaagagcggcaataataatattaacccctcttaatgtgaatacgattaaaagggccagtgcgcctaataagccaatcatgctgatcattttgtctatgcccccttaatggaaaacggccggtttttgttgaaagagggcctcatacagctcaatcaactctcgttttgacgggacacgcgggttgttttgcggacttccgctttcaagcgcatcgtcagccattttagaaagcattggcataaatgcctcttcttgaacgccccagtctggcaatgtaggaatatcgactttcgcgcacagtgctacgatttcttcgacaacggcattagctaatgtttcagtcccttcgccgctttttcctggaaagaggacacggccgattgaagcaaggcgctcctggcaactttcctttgtatattcaagcacaaccggtaaaagcatagcgttggaaacaccgtgtggtacatggaagagagcgccaattggccttgacatcccatggacaagacaaacggatgaattggagaaagccatgcctgcaagcagcgagccatacaacatttcatgccttgccttcatatcgttgccgtctttataggcgggcaatagatagtggaaaatccgctccattgccgatagcgccaatccatcggtaaacggatgtgcttttttgctaatataagcctccaacgcatgggtaagcgcatcaattccagtagccgcagtaatgtgtttaggcgtcgattttgtcagcactggatcaacaatagccgtccgtggcataaaggcttgctgtttaatcatcattttgacattggtgtctgtgttcgtaatcactgtcgcgtctgttgcttcagaaccagtgccccctgttgtcggcaaagcaattaaaggaaccgccccttttcgcgcaatcgtacgcccgttcatgtattcatcgattgatccgccattggctgctagcaccgcgacagctttagctgtatctatacagcttcctcctccaatggaaacaatgacattgcaaccttttgtacgaaacaactccaacgcttcatacacgtacgtatctgtcggctcagttgctacacctaaataggaatacgatgggattccgcttttcttaagcaatgcttgagcccgttcaacatttccgagcctttccattactgcatcgctaatgatcagcgccttgcttccaagcttcgcagcttcaactccaacttgcaaaaaactgttttccccataaataatcgtggctggcaaatgacaggttgttgcttgcatctaatcccctccttgttgttctgccattgcaaaaacgatgccaactaccaatcaagatgattgaaagcgttttctataaactgtatcgcaaatttgcgacacagccccttgccactgtcgttaaattacgacgactcttgttcttttagcttacggtacagtgtcgcacggtggatgcctaacaattttgcagcttttgccttatttccgtttgctaatacgatcgcttgctcgattcgctccttctcggaacgtctcgccacagcctttaatgattctttcttcgctgcatggtttcgcaaaaatggaggcagtgtatcacttgtcactttttcctcttcaccgattgccataatataatcgatcgcattcgccaactcacgaacattgcctggccaatcatactcaaggaaagcatgcaaagcgtcttcgcaaaatcgtttgtgtctcagcccgtattcctgtgcaaaacggtccataaacgcgctgattaaataaggaatatcttctttacgttcacgcaacggtgggatgtttaatgtgattgccactagcctataatacaaatctttccgaaacttgccatcggccactagttggttgagatccgcattggtcgctgcaattaaccgaaaatcggtttggaccggccggcagctgccaacccggtcaacttgtttcgtctcaagcacacgaagcagctttgcttgcaacgcatttgacatttctcctgcttcatctaaaaaaagcgtaccgccactggcttgttcgaatttccctactgccccgcctcgtcgcgcgccagtaaaggctccttcttcgtaaccgaacagttcagcttcgagaagcgtttctggcatagcagcacaattaattgccacaaatggtccattggcttggttgctcatttgatggatcaaacgggcaaacagctcttttcccgtacctgtttcacctgtcaatagcactgtcgcttttgtgcgtgctactttgcgggcaaaacatttgcatgattggagtgcctcgctcctgcctataagccggcgctcgactgacgttgcgtccttctttgttggttcagtggatggtgactcctcacttaaaaaaacgcgtgctcgttgtaagatttcataaagttcggaaacaccttcaaaaatcaacatgccgacagctccgacaacacggtgattttgccaaattgggatacgatgcaccaccatattttggccctcaatccgttggatctcgcctcgctctggaatgcctgattttacaacttcatgcaagcgggtattctcaatgacatcagcgacaaacttgccttcaacttccgcttcgtcctttccgccaataaagctgcggtaagcattgttcattttgacgatctttccttgcttatcgacaatgacgatcccttcataggcgttttctaaaatcgcttccagtatcgctttttgctcgtactcttcccgcgcccgccgccagttttcccttgtgactgccccaatataatcattgccctctttgatgagaaccactttacttccgtctggactaggtgcacgcctgtcctcgatttcaatcacttctaccgattctagcgctttttctatcgctgtttctccatggcttatcgctgccacaatcgtttctggaagcaacgccccaactggttcaccttcttctgtcacgagcacgatcaaagagcctgcatgttgcaacagacgggcccactcctggatggtccgttcttcatagaaagcaaaggaaacaggttcgatccaatagtggcttacatgaaaacctgattggttgatggtcatttgctgtaccacggcatttcctccattccaataatttgtctaagtgcttttgttcgcgtttttgcatacctctttttttaacgtacaagagccctcaagttggaagcgacgtacctattgtttcactactgccaagtgattcccttcaaataaatacaaaggaacatgtgattgaaatgggaataagtttttttggtgggccactgtgaatggctctgacatcccgacaatgtgggcgtggttatggaacatttcagcattttttcgttttattaagatcatttcacgcattctttatcagatcttaaatagatttggaaagctgtctcctttacactaacattgagagctaacgaaacataggctccaatatgactagagaggtgagcacatgtactcaaacgaagatttgcatgcagttgaagaacgggcgaaagcatttttgcctacagctacaagcgaactctccgcttatttacgggccatcgaagaatacgtgcgaagcaaacgcaaggatctcggcttcgaccaagctgaacatctagaaacacagcttcttgtccactatggcttagaataaagccatcttcatgaacactaagaaagaagcctcgtcaaggcttcgtttacataaatctgtattattgtatgtgcatatccggttcaacccaaattcccctggcctatttggaaccaggggtttcctatttttcaaacggtcagcatgaccaccgcgttcattatcttttttcacattaatcaaatgtttaattaactgccgatcattccctttttcatgctacaatatttttagagacagaaagtttaataaaaaggggcgaatatcgaccatgccaatgattcacgctgaaggctatcattcttttgaagccgaaaatggaaagaaacttgtattagcgttggaagacaacggagtagacattttgcaccgctgcggcggaaatgctagatgtactacgtgcatgtgcgaaattaccgaaggcgacgctggcccaatcggagaggctgaagcagcgattcgtgccaaaaaaggcatcactgctgaaaacctacggctgtcctgccaaattcgcgtagcaaatgacttgaaagtcaagccgcttcgcaccgcaacaagcgagcagatggatccaggcaaacgtccagaggagtaatgccggtccagtgctattgccgccaaacggggctgcttgaagacagcgagggtcctatctctcgagtagatgaattcagcaagaaagggagggcatttatcgctctccctttcttgcatataggccatttacagaaagtagtctctgacatccagccaattatggacacggggatagcccgttacgttcacattatgaggcgatgtaaacaaaattccttcgcctgaaaaacgttctaattgccgcacattatcgtcaatcaaatagtcggcgtggatgatgcttttattgccgcaaaagacaatattttggtcatcaataaacgggaaatgctctttgagccattcgtactttgcattaaaggatgttggaaaatccattgccgccgttgccacaaaaatttcgtacgactgggccagttcctctacaacctcttggcaatgttccatcacctccaggtcgcggaaataagtagggtcgagcaaatagctgcgaatttctttcactaactcagggcggagctcccttagctttttgccgtgtaaatcatcggttgttagttgctcgccaaaatccctattaaacagtgccaaatgctttttgttaaaatcagccatcacttcatccatgtcaattgcaattcgtttcatcattccacccctaattgattgttctccatatagattaccatagtttttagaaacaggttgcctgacaaatgtatcgtttcaagttctatgttctagaggggttatgtcatgtttgacactgtaagtgacgacatgttggttttgcccttacaagcagctatactcagagaattagaagcggcctttttccgactgaatcaaaaaaagaccgctcgatttcaaggatttaactttataatgattgattttctgtttgcaaaaaccgcacatgattgacagcctttgtgtcaatatattggcttgtgtctggtccgtatccataaccatccgttccatcaataatcaacaatctaggggtgacacagacgaggatgccttcaataaaatttgtatctgtggcaacctccacccgcgcatcgagtcgttgaactagcctcttataaagagtattgcacaagtactttgcctccttccgcattcagcttagtgacctgatcgtttcaattttggcaatgcggacaaacacgtcagcacccatttcatccaacaattcaatatagtctttcccaacgaccactaattcgccagcgagaaagccgaagggtgtcgaaagttcaatttgtttaccgatgaggccgcgtagcagctctcttttcgcccgcgcctttttccagcatcttgggaaccagaacaacaagaaaagattttttagtgcataccaaacacgtaccatttttcccctcctttgcaccttctttagtaaatgcaaaatgagtatatttgcttgttaggttcgcctatgttcgtttaaaattcacgaattgtaccgattcgcccattttcttttgcccaccaacacgaatacagcaaaaaggactgagatgcaaaagcagcaaccagtcctttctattgattaatcactcttaagcccattttcaccataaacaattcgtttgccccaactcgtcaatgggcctgatgggccttcagctaaatccaggtattcaacacccccgctgttgccataccatgaccaggccagccagcccacttgccgctctgctgtataggccaaaatcgcatcttcatcgacatcgccatcatgatgactatggccaaattcaccgatcaccacagcaagattttcagcaagcacacgatcaatgttataggcaattgtcgccctatcagctcctgcatattcgtacatatggatcgaaaacatcgtgttttttaatggatcggacgcaaacacatcggctccccgctcgtggattgaggcagggtactggccccaacctgccgcatcaaccattaatgtatgggagaggccagcgctgcgcaagcgcgggatcgcttgtgcgtatgcttctgcccaaacgtcgctcctccacgacccataccattcattggcaacgttaatgattactcggtcttctgtccccttgagaacatcagccatttcgatccaataatcgactgctttctctaaatcagcaggatcgtcacttcctgtagcgtcatggacttccagcacagttgtcaatccatatgtttctgtggcagccagcacacgggcaagctcagaggcatcatctttttcccattgctgtccattggataagaccattctcaccgtgttcgcccctgtttctgctatggcagggattgcttcctccagatcttgcttaaaccaagagtgtccatggttgacgccacgcataacataaggatcgccatttttgtccaacaactctgtaccggatacgtgaaatccgttttgtgcatatgccgaaccgctaccgtacacgaacaaaaccaataccactagtgttccaaacaattgtaaccgctttcttttcatttgatccatgtcctccctcttcacaaaattagtccatatcaaactctgcacggagactgtctgctaattcgcctaaagcatccgctacatccacgtctcggttttcatccatgatttggtcgattacaggctgaatgttcgaggcagcagctggcttatctggaaacatgctttgcacgactgtgttttcttccatgatcgtctggaaagcttctacattttctggcacccattggccttcggcaaatgtatgcgtttcacgagtgactgacggattggcgccaacgatgttcgcctggatggactggccttcgccatgggttaaaaattctaacagcttccacgcttcttcaggatggtctgtttgcgatccaatgccgatcggcaatccaagcagctgcgatttgttcccagctttccctgccggcacttcaacaatatcccattcaaactctccgtcttcttcatattggcgccagtgccacggccctgcaaaagccattgccgcccggttagccaaaaacaaatcgccaagcccttccgactcggttgccaatggagcgacacggtggacatcaaccaagtcatgcataaactcaatcgcttcgattgtttccggtgaatcaatctcgactttagatccatctatattaaacgaagcacctccattttggacaatcatttcttcccagatcagcccagcaatcccaaactggacaatcttcccatcttcttcaatcgttgtcgcttttgctgcttctaaaaagtcgtcccacgtccagccagcttccggataaggatgccctgcctcgtcaaacatatctttattaaaaacaatatgatgagaagtcagatcccttggcaaggcatactggacgccttcccatgcgccaatatcccaagcgccaggtaaatactcgtcttcttttatgccgctttcttctataaatccatcaagttccattaacattccttggcttgcgtagctcgtcattgctgctgcatcgatcatccaaaacacgtctggctgattccgtccagccgacattgtcgttaaccgctcattaaaattatcccaaggaacatggcttaactccactttaatgccaggatttttttcttcaaacacatcaaggatttcacgctctcctttcagttctgccgggccatttccccagacaagcatccgcagcgttacatcgccgctaccgcctcctgcactttcctcgcctccacaagcagtaagggccaatagcgaaactaacacaaccggtgtatacatccatcttttcatccatctcatctccttaaatgtataattccgtcacctcaatggccgtataatttgataaactggccgttaaggcaaaagcaacatgttcgtttcctggactagcaaacaaatgcgctcttactgacgcttgccgaaaaaactttggataaggaatttaccctttgatgcctgacagtgcgattccttggataaaatgtttttgggcaatgaaaaacagcacgacgagtgggaaaatcaccattgtacttgcagccatcatcggcccccattgcatcgtttgttggccattaaacatttgcaaaccaagggctagcgtatatttatcgatatcatttaagtaaatcaacggtgtcaaaaagtcattccagcttcccatgaatgaaagaattgcgaccgttatcagcgccggtttcgataagggaacgacgatccgccaaaagatcccaaacaagctgcagccatcaataatggccgattcctccaattcttttggaatggctcgaaaaaattggcgcaataaaaagataaagaaagcgtttcctaaaaaggcgggaacgaccaacggcaagaacgtgttcacccagccaagctctgtaaaaatcaagtacactggaatcatcgtcacctggggaggcagcatcatcgtgcaaagcaataaaataaaccagacgctcctgcccctccccttaattcgtgcaaacgcgtaagcgacaacggcactggaagcgactgtgccgatgactgtcagccctgtcactacgattgtgttccagtaaaactgcaaaaagggaaccaattcaaatacttcgcggtagttagcaaaatcaaacggtgctggccataaagtcggcggatacgagatcgcttgcgactcggttttgattgatgtagaaaccatccataaaaaaggaagaataaacaaaatcgataaaacaacaagcataaggtaaatcattaaacggtctaatttcttttgcctcgtataatttttgaaaaccggctttgtctgattaatcggccctggcattcttgcaggctggaccggttcgatttgtctatttgcttggtaccgttcctccaacagcatttcctcccttcttcagtcgtcgtattcgtaataaactttcttgccaaaaaatttgaattgcagcaatgtgaagatcaaaacaatcacaaacaatacccaagcaagcgcggatgcatagcccatattgaaaaattcaaatgcattctggtagaggtatagcacgtaaaacaaagacgcatagtttggcccgccgccactcatcacataagcttgagtgaaaacttggaaagaaccgatcacacccataatcaaattgaaaaaaataacatgagaagtcatcgggattgtaatatgccagaacttgcgccactttccagccccatcaatctcagcagcttcatacaaacttggaggtacgccttgcaagccggccaaataaatgatcatgccgccgccaacaccccagaggctcataataatcaatgctggtttaaccatcgactcgctcaataaccagcgggaagtcggcaaaccaacagaatcaaggagcgcattcgccaaaccaaactcaggttggaaaataagcacccacaacagtgagcttgctacagcaggcacgatggaaggcaaataaaagatcgttctaaaaacccccataaacttcactttttggtttagaagcaccgccaacaaatagccgaaagcaagcccaaggggaacacctaaaaatgtatagaaaaacgtgttccacatcgttttccaaaacagcggatcatggaaaaacaaacgttcatagttttcgagaccaatccattcagccccgcccatcacttgccactctgtaaacgacatataaaacgagtaaatcattggccccgcagccaatgctaaaaaaccaatgagccacggggaaataaacaagtaaaaggctagtgttttgcttctacgcaacctcgccaatgctggccgattcatacatttcctcctctcaacgcatgcttatcctgcaatttctggttttgggcaaaaggactggttaaagtaagcgacagccccaattaaattggcatcattgccaaattggcatttccataaattgggccgcagatccaccattgaattggcttttataagcaaatcgattttctcgtaaatacgtggaatataatcgtttcgttcacttattgcgccgccgattaaaatcgcttctggatcataggtaaattgtagattgtacaggcctactgccaaataataaaaatgccgatcaacttccacacgggcgacctcatcaccagcttcagcaagttcaaatacgcgaatggcatcgatgtttgcacgtttagcagcggacacgcgttttgccagttcaacgggggaggtaatgctgctgaacgtttctccgtgtttattcataaccatgtagccaaattcgccgccgtagccatttgctccgcgatgaatggcgccatctttaataatcgaaccgcctatacccgatccagcaacaaccataacaatgtctttcatttttcgcgcgctccctagccacatctccgcaagagctgcgcagttggcgtcattttcaaagcttactgctagctgcatgcactcctgtgccttttgcttaaatggcacttcatgcaaataagagagggcgctgccgccgtcgataaacccagttgcttgattcggtattccaggcgtgctaaatgccgcgcctgaaagcgtgtagttggcggcataacgatgttttatgtcctgtaacaattcaaacagaagcgccatacttgcaggcgtcacatcgatgcccttttgcaaaatgtcacctttagccgttaccacgccatgtttaatcgtcgtcccgccaatgtcgaatgccaacaaattcagatgctttctctcccttccaacaacttcgctagaagccattgttttcaattaccgttttaaaccaccagccgctttttttaaccgtccgatttccatctttccccaaatcaacagacacaaatccatagcggtttttataagcatttgtccacgaccaattgtccataaacgtccacaaatggtaccctttcacattagcgccctcggttagcgctttatggagccagcgcaaatggtttgagatgaattcaatccggtagtcatcttgaataacaccagcttcatcacggaatttttcttccccttcaacacccattccattctcagaaataaagcactcgatatttccataatgatcctttatgttcatcaataaatcataaatgcctttttcgtaaatttcccagccacgatggggattgatttttttgccaggcatatcgtagctatcaaaaaatgttcctggcataagcgggccatctcctataggcgtctctttcgctttcacccgacgtggttggtaataattcacccccagtaaatcaactgtatttccagaaatcactgctttgtcgccctcttctacatgaggcataagcccatattgttttaaaattgccactagttcttgcgggaaagtccctttcacagacggatcgagaaaagaacggttaaaaaaagcatcagcgagtttagctgcttctacatctcgttcgttttcctctgcacgagggtaggatggtgttaagtttaaaatgatgcctatcttgcctccttgccctaaacggcggtagcgttcaattgctagagcactagagagcattgtatggtagccaacttggactgcccgcttgaaatcaacgactttcgggtaatggaactcgtataaataaccgccttccactggcacaatcggttcattatgggtaaaccacgttttcacacggtccccgaaatgcgtaaagcatatttccgcgtaacgggcaaacgcataggcgacttcacggttttcaaaaccgcctattttctgcatcgccattggcatatcaaagtgaaataaattaacaaacggcgtaatccctgcagcgagcaattcatcaatgacttgatcgtaaaattgaacggcttttttgttcaccgcgccatttcctgcaggaataagccttgaccaagagatggagaagcgaaatgatgtatggccaagttttttcattaaagcaatgtcatccttatagcgatcataaaattgcgatgttttggctggccctacctcgttaaaaaaacggtttggctcgatttcataccagtgatcccaaatgtttttgcctttgccgtcacggtctgccgctccttcaatttgcgtagccgacacggccgtcccccaccaaaagtcaggtggaaacagatacgtcgtcatcgtttctccccttttctaacgagtttgattttgtctctattctatttaagttaacgtttaagtaaaagataaagatacgataaccttaatatgaaagcgattactagtcaatagccaaaatgaaaataaacaaaaaaacagcttttgcaagctgttgaaagaagtacgtttagttgttcaatcctattgaatattctttaccgattcgcgaaagacaatcgatcctttgattaatatcctcccatagccatcgctgcctttatcgccttcgagcttttcaatcattcgttttgtggccactttggccatctcttctaaatcgacttccactgttgttaaaggcggggtcgacaacgttgcgtaaatatcattatcaaagccgacaacagaacagtcttccgggacacggattccgctatccgacaactttttgataagcaaatagcctacatggtcgcaattgcacacaaaagcagtcggcagcttttccggcaatactaagtcaataaaacggcccgcatcatcgcgatcactgaccaagtaccgctcattaaaagggagccggtgttctagcaacgatttatacattcctaaaaagcggtcttggatgctacttgttgtgtggacattgccaacaaacccgatttcacggtggccttggctaattaaatagttcgtcaactcataaacggcataaaaattatcagtgacgaccacatccgcattcaattggtccgtataaaaatcaaggaatacgagaggcacgttttcttttgttacatgttcaatgtattccttttttggctggccaagcacaataacgccgtccgccctgttttctaaaaatgctttcggcagcatgagccgctcttcatcatcggagctcaatatttgtaagatgccgtagtagtcataggattcaagtaccgatataatttgcctgtaaaactttaaataaaatgcttgctcatcaccggcaaatcgttccgggatcaagatgacgatattattggtgcgcccgcttctcattgacttagcggccgcatgaaagcgatagcccatatcagctgccatctgcttgatttttcgtttcatctcatcgctaacgccctctttatcattcagcgctttcgaaactgttaccgtgcttacacccgcttttttcgcgatatcacccattgtgaccatttcaccactccttctcacgttccaactatagtttaccttttcagaacgattctgttaagcataggatggaaaagcaaaagtttaacgataaagtaaaacacaaacagcagctatacacaaaacaaaaaggagcaggttgtgcctgctcctgttacatccatttaaacttccaattttgcccgccttttatgtgctgaattaacggtacatcggtgtcaatcacccggcctagcacatttactttctcatcagcaggcaagtctgttttggtaatttgtatttcgccttggtaacggccgtaacggttattgtcaattgtcactgtgccaataggccgctccccagtgtttgccggcgttacgtctcgcttcccaatagatgcgaaggaacgagatgactctgaccgaaggacatcacgggctgcatctttgcggttgcggtgtttttcctctacatcaacgacattctccaccgctggctgcacccgcaacagcactgctttttcattatgatagacgtgaaattgttcaaagctgctatcagacaagcccttgtcgccgactaaaatcgtttcaatgccttcgccttcatatagatctagaaacgaggcaaacggcgacatgtcccgatggtcttcaagtgtcggcaaacccttgaacaacggagccctaggcacgtcgccaggaataaacgccattaccgaaaagcccatttcagacagaaaggtgtttgtttgacgaaagtcttctcggcttaaccccgtctcagggcgagggtaaaaattatgccatacttcaactttgtttggatcgaggccggcttggcgcaaggcgattgcttcccttttatcgacagtgcttgcatttaagacaacttgcatctcttgtgataggcgcacgaccgtctcagtcgccacaccataatcgatacgcaatcctgtcacgccccactcttttaaattgctcgcttgttcccatgacaagtttaaatggttcattgagtcaggcgacacatcgcatataagccgcatatgatttgctttggcaaacattccaacttgcttgagccgttctgcatataaagaagcatcgtcttcagggatgtgcaatgaagtaaacagtacattaaatccagcggcagcggctttttttatataagcttcttgctctataaatggctggctgagataagcagatacaccaagctccactctttcctcacctccaacttaaatgtcttttgccatttcttctttaaaaccgaacatgtaggtgaacagaaaaccgaacaaataggcgagcgcaataccacctaaatagtagaggtatttgccttccgcaattaacggtgttagggacaagccggaaacgccgattcctgtagagcctgtggcaaatattgcttgcatggccccaccaacagccgcacctaaactggctgtcacaaacgggcgcccaagcgggagcgttaccccgtaaagcaacggttccccgatgccaaggaagccaacaggcaagccgcctttaataatattacgtagacgaggattccgcgttttaacaaaaatagcgattgctgcgccaacctggcctgctcctgccattgctaaaattggcaacagcgttgtaaaaccgaatacattgataagctccgcatgaattggcgttaagccatggtgcaatccaaccatgacaagcggaaggaaaaagcctgccatgagcgccccagcaatcggcccacccatgtttaaaatcgagtggatgccggatgtgatcccatccgatacaatgccagcaacgggcataatcgcataaatcgataagaagcccacaatgacgacagtaaacagtgatgtgaaaatgatatcgaccgatttcggtataactttacggatgtggcgttcaaagaacgtcattaaccatgccgcaaaaatgacgccgaacaatccgccacgccctggcacaagggcttcgccaaatacggtcacctcggcaagggccgggttgaaaatgaacatccccgcgatcgctcctagaaccggcgtgccgccaaattctttagcggtattccatccaacaacaatcgccaaatacgtaaataggccgcctcctaaaatggtcattaacaaaagccacgtatgttcttctttttgcatgcctgagttaattaagaagttggccacgccattaatgatacctgaggcaacaaggcctggaatcaacgggataaaaatattccctaagcttcgcaaaaattgcttaaatggtgttttgtttttctttttccgttcttgctgggcgttggcagcctgttcttcaaaagacgtttgccctgtacgagcgagctttttcatttcttccgtaacgacattgacagtacctggaccaacgacaatttgccatgtatcgtcttcaacgactcccataactccttccattttctttaaagcatcttgattgactagggcatcgtcttttacagcaacacggacacgcgtcatacaatgggtaagggactcgacatttcctttcccgccaatatgttcaagaatttctgaggccatgcgttgttctttgttcacacgtttccccttctttcacaaattatttttctaccgttttgcgaataaaccctttggcgttttgcaactttgtaagcgcttcatcataagagcaatcaagcaaaatcatcacaattgccgcctttacatgcccatttgctttttggtaatagtcggctgctgtctcataggttgaatcggttgcttccataataatccgtttggcgcgctcaactagtttttggtttgtcggttgtacgtcgaccattaaattttgatagaccttgccaatcccaaccattgctgttgttgaaatcatatttaaaatgagcttttgggctgttcctgcttttaagcgagttgatccagtcaacacttccggccccgtttctacttcaatcgcaacggcagcgtattggctcattttcgcctccttgttgcaagcaatggataccgtgttagccccacgagcctctgcctctttcaacacgccaatcgcatacggcgtgcgcccgctagctgcaagagcaataaccgtgtccttttcgcctatatttaagcggttacaatcatttgcacctgcacgctcgtcgtcttctgccccttcgactgcttctgtaaatgcttgctcgccgccggcaattacaccacgaaccatttccggtgaaacaccaaaagtaggtttgcattcaacagcatctaaaacacctaatcgtcctgaagtaccagcgcccgcataaatgagccttccgccctgttggaaagaagcaatcactaatttgaccgccttttcaattagcggtagttgtgttgcaatggctgttggcacttttccatcttctctattcattgcttttaaaatatcgtgaatcggcatactgtcaagcgccattgtcgcttggttgcgcgtttctgtttttaacttatcaatcaaaccattcacctcttaatcaattgcatatttatatatttattatcgctctatagaaataaaacgtcaatataattttaattaattacgaaataaaatttcatacaagctatccttgtagctattattgttttccttatttgatcgtggtactttctaaaagataacggctttgcagggcagttgcatgatggagggaaaacgatgcgcaaaatacacgttacgatcatcgccccttatgagggcttagcagaaacatttaaacgaatacaaaatgaattcgaacatctcgatatgacgatccatatagcggaccttcagcaatctttgcctctattgacaacagaagtacaagcgcagaccgatatatttattagccgtggtggaacggctaaagtgattcgcactcggacagaaaaacctgttgttgaagttcctatatctggctttgatattttacgaatgattttgctcatccaagccgagcgggaacaaacagaaattattgcctttgaaaacatttccctaagctttacgaaagtaacagagttaatcgaaaccgacattccaatcacagcagtcatgaaagaagaagaagtggaaccagccattatcgccgccaaggcagccgggcggaagatgatagtcggtgacgccattacgacgagcttggcgaacaaacatgggttggaaggaattttaattacatctggagaagaatctgtcagaactgcacttgagcaagcggaccttttaggcagaaaaatgaatgacagcaagcaacagcatcaatattttcgttctgccttttttcagtctgaccagttccagcttttagctgatggaacggggcatgtgtttgctataagcgacaagctccaagagaacgagacgttgctgaaagcagcgaccagccaattactttcacttattcaaaacaaaacacacgctttctttacagaagcaggcggaaacaacgtttgcttcgctgtaaaaaacatcggcactgaaaaggcaccgacctggctattaacggcgacagctctccaccaatcgctgccaaaaggagctaccgtgtttgaagtacctcatttatccgtaccgctcgtcctcggggcaaacgattcgctatctcgtgactatgaagccgctactggcaaacattctgtagcgcttattggcaaaaacgggtctggagaacaagcgctcgcaaaaggacttttgccaaaattggccattacatgccgggcaaaagatttattgaatgtgcctgattttgaagcaaacgggctttccttgtttattacccatgcagaagaactttctactacacaatggagacaactagagggcacagtgcttaaaacagcgccttatgttgtccacagcgaaaagccgttgtcttttctaaacgatatgccaactgtttggataccgccgttatgtgaacgcaaatccgaatggccaggctttataagacgcttaattgcagaagcgaaccagctatacggcaagcaaattattggctaccggggcagcattcacccagcgattatgggaaatttaaattggctaaaggagttcatctttgcaaaagtcgtagcaacaagccaaccgtatattgactttagcgacagttggtcagaaaaaggcttcgctcgaattgatttagaacagacgctggaggaaatggaaaaaacgttgattaaacatgtgcttgaagaggaaggctataaccaatcaaaaacagctgaacgtttacaaattaatcgaacaacgttgtggaggaaactcaaataatgttgctatttgcaacattatttgagttttgtattgcaatttccaaaagaaagcgtatcatttttgctgtaatcatttcttttaagcgtttccagcttgaatttcgtttcaaaatgaaacagaaagaagggatcttctgatgaaggtaaaacaaagcattgaaaaaattcccggaggcatgatggttgtcccgttgcttcttggtgcacttatcaatacggttgcccctgacttgcttaggatcggcaactttacacaagcgctctttgtagacggcgcgactaccttaattgctcttttccttttgtgcgcaggctcgcaaatcaacatacgcagttttggcgtttcatttggaaaaggctttacgcttttgctagttaaatggatttttggcggcctcgtcggtgcgatcatttatgtactggctggagggcctgaaggcttattcctcggcctcgctccaattgcagtcattgccgcaatgaccaattccaacggcggcctttatgttgcgcttgcagggcaatacggaaaaagcgaagacaaagcggcctattctgtacttgccatgaacgatggcccgctctttacaatgctgacattgtctgttgtcggcgcgatgggcgtccaaagcggctatttttccatcaccgcttttgtcggcgtgctcttgcccattttaattgggtttgttttaggaaacattgatgaagacatccgcacgttccttggaaaaggcagcgacatgctcattccggcattcgcttttgcacttggcatgaacattagctttacgtccattcttgaagggggactgccaggcgtcgtacttggtgtgctcgtcgttctagtaaccggtatcactggctactggacgtttaaattgttcaaatggaacccactcgttggcgctgctgaaggatcgacagccggaaatgcagtagcaacgccagcagccattgccgcagcaagctctgcttttgcctacaatgttgaacttgcaactgtccaagttgcagccagtgtcgtaactacagccattttgctaccgatttttattggctttttggctaaacgtttagagaaaaaaggccagcttcctgaagaagcgaggcaacaagcgtaaggataggagagtcatcatgaaaattgccatcattgccgatgaccttaccggagcaaatgacagcggcgtccagcttgccaaagcaggcttggacacagttgtctggctcaatggcaaaggttcgtcagaaaatcgcgcagaagcagtcgtggtcgatacggatagccgtgccctttctcctaaagaagcgaaagcagctgtccatgctgccatgtctgcattagcgccttacaatccaaatttgatttttaaaaaagtcgattcgacattgcgcggcaatgtcggggcagaactcgaagcaactgccgaagcttggcagccggaatgcattttgttagctcctagtttccctgccaataaccgtacagttgaggatgggatcctttacgtaaatggcacgccaattggggaaacagagtttgccagaaacgaagcagatcccgtttctgactctgccatttctgaccacattggccgccagttccacggtgccatcgcccatattcccgaatcgttatgggccgaaaaaccagaaacgattagcgcttggcttgatcgcaacatcgcaaatgaacaaactgtttttatttgcgatgcggtttcaatggaaacactcgaacgaattgctgctttttcgcagcagcagccgaaacgactgcttttggctggttctgctggcttgtcgaatgcccttgcgcagacgatggtgtccggcacaaataccccatttgctgaccatcctgttagcagtgaccccatcctttatctcgttggcagcatgagtgaagtgagcaagacacaagtggcccatttgctcacgcacccacaaacggaagggattcgccttcatgcggcaacagcagcgagcaatgaccgccatacacaagcaaaagagtttgagcgagtggtggccgctgctgaaaagacagtagcgatcggcaaaatacccgttattttttctggaacagagcgccaagaagtcgctgaagtatatgactatgcgaaaacaacaaatacggcaattagcgaattggcgaaacgaattgccgatacgattgcggcgatcggctccaaactaatggatactcgccatttccaagcgattattatgaccggcggcgataccgctaaagcactatgccggcggctaagcatcgatgaattgcgtttgcttgatgaatttgaaccgggtatccctgttgcccagtttactggcgaacatcatcagacatacgcgattacgaaagcaggcgcctttggcaatgagaaaactttctcgaatctataccaccactttactaaggaggaaagcaaatgagaccaatcattggcattaccatgggagacgcagccggtgtcggccctgaaatcatcgcaaaagcattggcggacgaatcaacttttaaaattgggcgtcctgtcgtgatcggcgatgcaactatcatggaacgggctgtcgacattactgaaacggaattgaatgttgtgtctgtatcaacggttgacgaatgtgtctttgaaccgggaacgattgaagtcattgacttgcgcttgttaacggaaggcgtatctttcggacaagttagcgaagcggcgggcaacgcagctttccgttatgttgaacgggcagtggagcttgctaaagcgaaaaaaatcaatgccatttgcacagctccattaaataaagaagcgatgcaaaaagcagggcatctgtatccaggccatacggaaattttagctgaactaacggggaccactgatttttcaatgatgctatctgctccaaatttaaaagtgatccatttgacaacacacgtaggtttgcgcaaagcgattgatacgatcaacccagaacggacatataaagtcatttctttagcgcatgaaacacttgcggccgccggaaacaagcagccaaagattgctgtatgcggcattaacccacacgctggtgagaacggcctgtttggagaaggcgaagaggaagaaaaattggtccctgcgatagaaaaggcgcgtggagaagggatcgatgtagaagggccatacccggcagacacactgtttttccgggctgcgcgcggcgactttgacatcgttgtcgcttgctaccatgaccaaggccatgtgccaataaaggtaatgggcttagaagcaggcgtaaacatcacggttggcctcaaaggcggcattgtccgtacgtctgttgaccacggcacggcctttgacatcgctggcaaaaacatagccgatgaacggagccttctggccgcttatcgggacgcggttgagcttgctcctaaataaaatcaactttgtgtcgttctatataaaaagagctttaggcgttgatttggcctaaagctctttttgcttaacggcgtaagcgcaatgcttcgtcacgggcttttaaaaatgcggtaatcgtgtcttcgtctttttcatggaatacacttaaataaagcgtatcaataatgttcaactgcgtcattcgcgaggcgatcgtgccgatgcgaaagtcttcttccacatttggcgtacaaagagtaatatctgccaacctatataatggcgagcggtccattttcgtaatcgccacaacggtgacgccttgcttttttgcaaaggtggccaattccactacatcctgcgtttttcccgacaagctgattgccacaaatatatcgcctttttccatataaggaatgagcgaaagattgtaatggaaatcttgagaagaagatgcctgatagccaatacgcgtaaacttatagctaccgtcgaatgcagcagcggcagagccgccaactccataaaagacgatgcgcttcgctgtcattagcacagcaaccgcagcttcaagctgcttccggtcgatcgatgacaacgacaattcgatcgcgcttttattcgtaaacgtcactctgcggaacaaatcataaggcgcatctttttcttgcaacgatgaaaagtcggttaatctttcttttgaagccgttacatctttcatcagttccattttaaacagccggaaactgttaattccaattttcttgcagaagcggatgacgcttgcctcactgaccccagcgcgagccgacagctctttcgtcgtcatgcttgggatttggcttggactgtccaatatcgtttgcccaattcgggcctctgcctctgataggctttccagttctttttcgatttgcgcgagcaacgaacccactttggacgcacaccttcctacatgtctttcgtttcattatacctgctttggcggcaattacaaattgggaaatcgcttttgtgacgcctttactgaacacaatgagcgtgcgcccacttttcttaatcaaactgaagctgctggcttaccagttccttataaagtgggtgtgtatccagcaattcagcgtgtgtgcccgcgcccgttacgtttccttcctctagtacaatcaattgatccgcatgcctaacggtcgctaatcgatgggcaatcacaagtgtcgtccgcccttccatcagcacttcaagcgcttcctgcacaagtttttccgatgaactgtccaaatgtgctgttgcttcatctagaagcaagatttcaggatcgcgaatcatcgcccgggcgatcgcaaggcgctgccgttgtccacctgatagtcggacgccccgctcccctacttccgtatcgtatctgtctggaagggaagcaataaacgactccaaatttgcatgccgaaccgcagccgtcatgttctcttcaggaacatccgtcagcccataaaccaaattggagcggatcgtgcctgccatgatcggcgagtcttgggaaacataggcaatcttttgccgccattcatgcaaagggaggcggtggatggaatgacccttatattggatcgtgccgtcgtctggcacataaaagcgttcaatcaatgaaaacaatgtcgtcttccctgccccacttggccctacaaaagcggtgaccttgccgataggagcatcaaaattcacctcttttaaaattggcttgtcagcagtgtaaccaaaggaaacgccttggaagctgagtgtgccagcaggcgcaactgctccatctacgtttgcagcattcttttccggctcagctcgcaaaatcgtctcaaggcgttcacttgcgccaagcgccttttgaaattgagtgaaaaagctggccatttgtgtaaatggcattgcaatttgaaataagtaaaaaatgatggcaacaagggctcccgccgatagggttccagccgaaactctcatgcctccgtagccaaaaatcacaacgagcataatgagcatggcactcatcatcaatggttgaatgacagccataatcttcccttcacgcatcccaaagcgaaacagcttggccatacgcgagaggccgactttctgttcgactccttcagcaagagacgccttgacaaggcggatatctgatagaacgcggcctaaatcgccttgaaaagaggctgtttcatcttgtaaagactttgacaccttatacatactgcgtcctaatggaatcataacgagaagcgaagccggaacaacagtaagcatcatcaacgtcattttccaatcaatcgccaaaagcaagacgatcgagccaataatcgaaactatgcctgaaaaaaatgggattagctgcattgtcaaaaaatcttttatgacaagcgtatcattggtcatccggctcatcaattccccagacgagtgtctgtcaaaaaagggaacaggcaagtgcagcatccgttgccaagcttctttcctgagcgcgaacacgactttctggccaatatacatcatcgtataaagggcaaaaccggacatcacaagttgtgcgaaaaacacagacgcaagcaaaattaccgtttgtccgtttaagccaactgcattcatttcgtccacgaaattcattgtcaatagcgggacaatgagcgataggctagtttccccaataacaagaacaactgcgagaacgagccaagccaccttcggcaaaaaaggtttgaccatggaccaaaaacgtctagctcccaatgagccggcaagttcatgttccatcttcttccccactttcatttctaaagtaaatttccattgcttcatccatatatttttgtaacctttcagggaaatggatgaaaaataacctctcatgttcgacgaaaaacgcttcaatatcaccaagctcatcaaccacattcggaaccgatttcattggaaaactagaaaatagctcctttatataactttggacttcttccgctcctggctcaacgttgttatgaagcgcgtttttcatccgtttgtaaaaataagccgcttgtttgtctatttctagttgtacgtcaggatcctcgtcatagtcaaacaattcatttaatagactttcaggaaaatgggcgattaatgcatctttttgccgtttctccaaacggaacgcgtcaaggagcacaaacagcaaatcatcaagatcttcttcctcgatcccttctaaatcatataaagcttctgcacgcctgattgtcgccaacacctcttctaattcccttttcttttgttcaagcatgtttttctgggccacgagcatttctcttccactccaagcggaggtttttagcttctctttcatatcagcaagcgagaaaccaagatgcttaaaaacttgaatttgttgataccgttcccattctttgcgggtgtacagtttatgcccattttcattttgccgttcaggcgtcaacaatccaacttggtcgtaataacgcaatgtccgtaccgtggtgccgacttttttggcgaacatgctgattgtcatctccatcctatttgccccctttcccctatcgtaacctgtaacgtaacgtcacacgcaagcacctttatctcaatgaacaaaaacattcctaattatttacgatacgaagccggtacgggattcacttctcataagacaacgttgatgttatccgacaacgaaaaaagaaccatcatgcaacgcttcatgatgattctccgtccaaacaatattatgcccttggtttcgttgaatttctccgcaccagttcaggcgttagtttccgaccagtagctgcttgctccccttctattaaggccaacagcgtttcaaccaactcttttgcgagcttgtcaatcggaacgcctactgctgtcaatggcacgtccgcttcagctagctgtgggatattgtcataggagatgagcgacaaatcatttggaacttgaatgccgttccgccttaatgcccgtaatgtaccgatcgcaatgtcgtaactggaacaaatgatcgctgttgggagagtgggctccgtcaacaaacgttcgatcgcgctatcagcgtcacaagcgtcaagccccctggtatcaattcgttgcgacttaagccccctctttctcatggcctcttcatatcctatctgttttgcttgttgtcgccttcccgtcccattgataacaccagcgtaagcaatggattggtggccgatttctacaaactcttttacagctaactccattgccaattcatgctggacgcctacagtcggaaactgttcaatagcaggcaccccgtaagaaagcaaagggatccctatgttatttggaagtttgtcttggggaatttcttcttcaaataacaaaatgccgtcaattcgcattcttgaaaatagctctactgcctcaagtgcatgattaatggataaaatcattgtccgtccgctgtttgttatatgttgatttactcgtgtaaccaacgccgacaaagcaacacgctcaattgtcggccacaccaagccaatcgtatttgtgcgtctcgtcactaaatgcttggctgaaaaattgggcgtatagccgagttcattcgccttttccacaatcatacgcttcgtttccggcttaacaagggggctgtcatttaatgctttcgagaccgtcgaataactaacattagctgcttttgcaatatccttaatcgtaaccgtcattctttctctcctttaggcagcgtttcgatctaaaaaaatacttgctaaaactagtctaatcgatatatgatgaaataacaacgttgttataaaggaatgatagcggtttctttttatttgaaaataacaacgttgttataaactcaaggaggaagttccatgcgtcgcacagctctattttttggaagcgtttttattggtctcactgttgcgtgcgcttcaccagctagcttgtcaacagagaaaacgacattgcgccttgcacacaatatgaatgaaagccatcccattcatcagtctctgctccactttgcagaattagctgaagaaaaaagcgagggcgctctgacatttgaaattttccccaacggccaacttggttctgaacgggaagccattgaattaacgcaaacaggggcggtagatgcgacaaaagtaagcgctaccgcgttagaaagtttttcgcctgtttacgctttatttagcattccttatttatttgacggagccgaccactattacacggtcatggaaagcgatatcgcaacggacatctatgattcaactgctgacaatggctttttcggcctaacttactatgatgcaggcattcgtaatatgtatacgatcggcacaccgatattagcgcctgaggacctgagaggcttaaaaattcgcgtacagccgagcgagacggcgattgaaatgacgcgcttgatgggcggcgctcctaccccgatggcgttcggcgaagtctatacggcccttcaacaaggtgtcatagacggtactgagaataatgaaaccgctttaacttcaaacaaccatggggaagttgcaaaagagtattcttacacagagcacgccattgtccctgatttgcttatctttaaccaaagccgctgggaaagttttagcccagaggaacaaaggatcttaaaagaagcggcacttgagtcaagtgagtttcacaaggagttatgggccgctgaaaccgcggaagcgattgcccgtgcggaagagatgggcgtcacattccacgaagatgtcgataaagcagcatttcgtgcaagtgtcgaccccatgcatcaacaagtaaagcaagacccagatttagcgccattttatgagcgtattcaagaaatgcgtaaggaggggcatacaaatgattgagaaaatcaatggtggattaggaaaaatcatcatgttcctatcgtcggtcatgtttgggctgatggtgcttgtcgccatttggcaagtcattagccgctatgtcctcaatgcccccagcactttttcagaagaatttcttcgttactcgcttatctgggtcacgatgattggcggtgcttatgccttccatctcaaaaaacatattgcaattgaaatgctcgttaaccgcttttcagctgcgactcaaaaacgagtgcgccagctcgtccagctttttttgattgtctttgccttacttgtcatggtatatggcggcatccagcttgtgtcattaacgctgtcccaacaaacagtttcacttggcatccctatgggttttgtctacttatcattgcctatctctggcctgctgattacttggttctgcctgacagaactactaacaggcaaaaatgggacaacccaaggctccgatgaaccgattgacctataagattatttcataaagaaggattgataaaatggctctccttgcaggtattagtttaattgtcgtgtttttaggattgcttttactaggcgtgccaatcgccatcagtgttgcaggtgcatccattgtcacgatgtttctgatcgccccttttgatgtcgcgatctttacatctgcacaaaagatggtgacaggcattgacagctttacactgttagcggttccattctttttgttgacaggcattatcatgaaccaaggaggcatcgctctccggcttgtcaatgtagcaaaactatttacaggcaaattgccaggttcccttgcccatacgaacattgtcggaaacatgctttttggatcgattgccggctcttccgtcgcttcggctgcggcaatcggcaaagtcatgaacccattgcaggaaaaagaagggtatgaccggaaattttcagccgcagtcaacattgcctccgccccaactggattgattattcctccaacagggttgtttattatctattccctcgttagcggtggaacgtcagtggcggcccttttccttgctggttatttacctggtatcctttggggtcttgctacactggttgtcgctttttttattgctaaaaagaaaggctacacgacatcgtcggctacaaaggttgaatctcccttaaaagttatctgggaagcgatccctagcttgtttttagtcattattatcattggtggcattatcggcggtctatttacagcaaccgaagcgtcagcagtcgcgattgtatacgcgttgcttctgtcttttgcctacaaaagcctaacgttgcggcagttgccaggcatttttaaagaagccgttgaactaaccgttgtcatcatgttcctaattgggacatcggccatgctttccctagtcatgtcatttacgggcattccgagcgccattagctccgcgattttagctttgacggataaccctattcttatcttgctgttgatcaatgtgattttgttactaatcggcattgtcatggacgtcacgccggcgatcttgatctttacgcccatctttttaccagtggtgatggagtttggcatggacccagtccattttggcgtcattttaatcgtcaacctttgcattggcaacattacgccaccaggaggaagcgctttatttgttggcagtaccatcggcaaagtcaaaattgaagaagtcatccgccctttgcttccattttacggcgcggtcattgtcgttttaatgctcgtaaccatgtttccttttttaagcacgtggctgccaactctagcgggattaatggaataaatagatagatagaccattagaaggagagaaacccattatgaatattcaacaacgttattcatttactgttgcaacgaaacacgacgcccatatcgaattttctgctccaaacacagacataaaagcacatgtttttgtgctagaacctaaaatcatccgtgtcttatttgaaaaagaaagcgggcttgaacttgaacgcacgtggagcatcgcccctggtctgaacgacctcccttacgaagggcgagagcgcaagagcacggaacattttagctgtccccgatatgattttcgtgaaacggaagacgcctatgtcgtcgaaacagagatggtaaaagcgaccattaaaaaagaaggctttcgcattacttggcaccggcgtgacaaagacaagtggacttgttttgcccaagaccgagacacacaagcatataatttcaaaggcgagctcgggacagggatcaagcattatttaaaacgagacattcgtgaacgctattatggattaggggagcggacaggcaccctgaaccgccaccatggccgtttccgtaatgtaacgattgatgctatgggctacgacgccgaacactcggatccattgtacaaacatatccctttttacatcacacaccaacctgaatcagccttttcttacggcttgttttatgacaatttggctcctggctattttgacctgggcaaggaactggataactaccatgggctataccgctattttgaggctgaagcaggtgacctagattattacatgattgttggtccttcgatgaaggatgtcgtgcaaacctatacatggatgacagggaacacggcgctcccgcctaagtggagcattggctattctggttcaaccatgacttatactgacgctgaaaatgcccaagaacggctatacgagtttatcgaaaaatgcgaggaaaacgatattttatgcgattcatttcaactatcgtctggctatacttcgattggcgataaacggtacgtcttccactggaacaaagacaaattccctgatgtccagaagcttgcccgtgactttagcgacaaggggctacggcttgcagccaatattaagcctgctttgcttaaggaccatccacagtatagcgacttggaacaacaatcgttttttattaaaaatggcaaaggcgaaacagaaacggctcaattttgggatggcggcggcgcttatattgattttacaaatgaagccgcttatcgttggtggatagaccaagtgcagcagcaattgctcgcatacggcataacatccacttggaatgataacaatgaatatgaaatttggagtcaggacgctactgtcaatggattcggaagcgagctgccattccaaacaatccgcgctctccagccgcttttaatgatgaaagcctcatttgaagcgcaagcagagcacacgccaaaagaacggcctttcttaatttcacgttctggcgcccctggcatgcatcgttatgtgcaaacatggacaggcgacaaccgtaccgagtggaaaacgattcgctataacatcaaaacgggcatcagcctaagcctatctggcatttacaactttggccacgatgtcggtggatttgctggtccaaagcctgatgaagagctatttatccgttgggtgcaaaatgggatattccatccgcgttttacgatccattcatggaatgaagatcagaccgttaacgaaccttggatgtacgaaaatgccgtccctgctattcgggaattgatccaactgcggtcgatgttaacgccttattggtacaccgcgttttaccatgccagcgccaaccatgagcccattatcaaaccaacgttttttgattttgaagaagacacacgcacgtgggaagagaacgatgattttcttgtcggcccatccatgcttgtcgcttccgttgtcgaaccaggcgtttccgaacggactgtttacgcacctgcacacaatggcggatggtatgatttttatacaggcaaccatgtcgaaggcggcacaacaactactttgccggccccatcccatcaaacaccgctgctcgtcaaagcaggagcaattatacctgtaaacgaagcaaaacgaacatttgccaaaaaagacgaggacaaacgaggctttttactgtttcctagccgcggcgccggacacacatcaaactatacgttatacgaagacgacggcattacaaaaaattggcagtccgcccacgcgcttgtctcgatcgaaatgacgaccacagccgatgccattcatgtaacaacaaacgtcgtttcaaaaggctattccctgccttatcacgaagcacgcttcaccgtcatgactgatgatagccgacctttgtttgtaaacggtaaagaagtggtggagatgggatcgattggtggtagcatagagcaataaaaaaagaaagctaatgacagtgtcacagaaaatgaaatcgagtgaatcgcttccgattcactcgatttattataagctgtttcttttgacaaagatacttttcgttaatcagaatggcgaacagacacagcaagttataaggcatctctatacaccgcagcagaaatagagcaatcgacgtctatttagtatacaacctccaaacaaattgaaatccgttctagcgtagctttaccggcaactcgacccttttagagcatgagaagaaagagggattggttgtgaatctagtgctttttaagggtctattatatttaaaaattcttcttggtcttctacaggtataacacccaatcttttttctttctcatcataaacttcaatttttgtgctgtttaaaacccaaatcgagaaagaaaatgcttcatcttttactacataatcagggggagagctagcacttatttcaataacatctccccatttaatattatttaaagtatgttgtatatactcaatatctttttcacttttaatttgtataggctttttgtttttagagtcttcaaattcaactgtaataccattagtgtcaccaaaactattttcagtattattgaaaattactagataggtgataacagcaatcatgcatattaacagcaaggtgaaaaatttattcatgatgatttttctcctttaaatatgtaatagttactttactgcttctcgagcgcctgttcgatcagccgcttggtgtgtggtgacagttcttgtttctgtgccatacattaatttatttctattactactatttgttaaatcgccaagaccaattgaatgaccaagttcatgggtagctggtgtatttttagcagcagcgctcctaccaacgcctggctaataatcttggttgattaagctataacgttttagctaactttagccacactataaataacaacgcttacgtttgcaattctttttttattgcctacttttaaaaaagcgagtgtcttacttgaatgataagacgggtagttggcccatatgagcaaaaaaacaagccagctacatagcagccagcttgtttcgctatcaatcatctcggtccgttccaagtacctctccgttcgtggcatcaagtttaatatcataatcgttgcctgcattggtaaccgttacttcatagtacgtcacttggtcgtccttctctaacttccagctgcttatcgcgccttccgcttccgatagagcgatatcaaccgcttcttgaggatcgatgatgttgtccatgtccaatgcatcctcttgacgctccacgcctccagcatcatttgcatcaagtgcttcttcccgttcctttgttacttcttgtgtctttgcgtctacgatgacctcatattccttctcatcgtcaagtccttgaatctcgtattgccacgtaccgcgctccgcctctaactcgatgcttgaaatagaggcgtcgggataggcgttctcaaattcagaaaccgctgtttccatgtcgacttgaatgtctgcattattcaagtcttctgagctatctgccccttggccttgctctgtgccaagatcggcctcttgctctggagcattgtcattattcccgttattgtcttggttgcatgccatcaaggccatgaccataaacgtcgaagctaatgtaacctgtaattttttcatagcaatctcctttgtgcatctgaaaatcttcctacctttatattctcatcattgcacaatttaaaacccgctatacactaaaaagtgattgtaaatccgtggagaaccgtgaaaaaacatattgcagccccggcaaaaccgtgcgtaggcagttaaaagaagcacgtgacatgatcatcgacttcaactagtgtgttacactacgacaaaagggggttatcctattttagttctactagccatcatgtttgtaacaacttgttatgttttacttaacacactattcacaagaagaatgggtagaattaatttttatgctgatttcattgtccccgtttcatttatctgtttaggcttgctccctaccgttttaaccttaatagtcagtcaacgtttctccttacaattaggctcgattctgctcgctatcgctttatctttactaagcttcatcttcacgttgattaaaaagaccaggctaaacaatcaagctaagataattgagtgaaactaaaaaaccaccgtttggtggttttttcatgctgtctgttaactttgtaaagatacgatgcacatcataacaagggaaatggcaaacgtccaacctaatcatcatcaacgattgagaacgcctctggcaaatgctcaataatatcgcttggggtgatagtggcaaggacctgtcgttgtttagccagcaagtctgctgcatagccatgaaaaaatacagctgatgagagagcaggttgaatccgttgccgggcaacgagtgcagcgaccatccctgtaagcacgtcgcctgaaccacctttggcaagcccggcattgcctgtgacattgacagaaatgcaaccacttggttcagcaacaatggtgttcggcccttttaaaacgacatacacgccatattgctccgcataactctctgctacttcaaagcgatttttattgacatatgaaaccgattggtcaattaacatcgccatttcgccaggatgaggcgtaatcaccgttggagcggttcgctcctggacaatcggcccacactctttcaaacaatgcaaggcgtcagcatcgagaatcaacacacctttgaaatgaacaagcaagtacgcaaccatctttgttagtgcaggcgtgcgtccaagcccaggtccgaccgcaatcgattgcttattgtccataaaagcggccaattctgtctctgtaggagcaagataaccatgtttttcgctaaaaatcgtatacatcgcttcttttacgtggctggcaattaccggcacattttgcgccactgtcgctatcgtcgtaaatcctgctccgctgcgaacagcggccgacccagccagcgctgctgctcctggcattgcctcgctgccggcaatgatgccaacccgtccgttatcgcctttgtgggcattcggtttgctcatcacccagctattgacgacttcatttttgccccaaatgtagcgttgtgacgcgagatgacgcaacgtgttaggtggaatgccgatcgggacgacgtccacttctccgtaatagggtttggtttcttctaaataatagcttacctttgtccattgtaaagtaagggtacggtctgcttttattgcttcgtggttcagctcggcgctgccagctggaacgccgcttggcaaatcaattgatacaatttcatttttcaatttgtttatgctggcgatcacggaagcatacggttccttaacttggccacttatgcctgtgcctaggagcgcatcaacaataatgtcggtttcgtaaagcatggctggccattggctctcaatgtctttccaatacttccaacggtagccactttgctcgaatacacgtttatgcagtttggcatctcctttgtaccggctttcttccggcacgatgaatacttgtacttctgcgccttcgtcttttaacactctcgcgacaacaaacccatcgccgccattgtttccgctgccgatgacaataaaaaagcggcgcttacgtccatagtggtctaacagcttacgagcaattccgcgtccagcattttccattaggacagcgccagggagccccactttgttcattgtaatggcatcaatgctcgccatttcctcgcctgttacaatccgcatcgctaccaccctttttataatattcgttctcttcccggtaaactgtagcacaaaccggggatttttgcattttaagagaactgattcatctatttccgaaagaatgtggtatagtactgatacagtttcttttttcctatcaaaggaagcaaacgtattgtgaaaaagaaaggttgagcgtgcaatgatggagagcaaagcatttcgttttgcgtgttggattattgtccttttgttgatcgtttacttaagttcattggttaactttatttttatgccgattgccgtgctttttcaaacgttgtttacgccaatcgtcatctctcttgtcatctactatttgcttagaccatttgttaacttgctaaacaaaaaacttcaccgcggcctgtcgattctcattgtcttccttgcattggctggccttgccacaaccgctttgctttatgtcgggccactcttacaagaacaatttatgacatttgttgacaatgtgccaggatatgcaaacgatattcaccacttattcgtagatttgcaaaagcagcctgcgttgcaaaatttcttggaaagcactgacttttcattggatgagctttctgggacgctaacagaaaacttgcaaggctatttacagtcgatcattgacagcattggcacattcattggcgctgtggcgaatgtcgtcattattgctgtgattattcctttcgtgcttttctacatgctgaaagaaggcaagaaggcgccgatgatggtcattaaccagtttccagcaagagaacaagaagaaggaaagcgcgtgcttggcgatttagacaaagccttaagttcgtacatacaagggcaaattctcgtcagtgcttgcgtcggcgttctctgcctgatttggtatttaatcatcaaactagattacgcgttgattttagcgctcgtcgccctgtttacaaacgttattccctttatcggcccgtggattggcaccgctcctgccgttatcgttgcattattcgattcacccggaaaagcgtttctcgttattgtcggtgtcgtgattatccagcaaattgaaagcaatgtcttctcgccacaaattatgggacgccagctttccgtacacccgctgacgattatttttgttctccttgtcgccagccagcttgctggttttgtcgggattctccttgctgtgcctgcctatgccgtcagcaaggtcattgtccagcacacgtaccgtcttatacgcatccacagacgttcaaaaaacataaaaacctaaatgggcaagtttaaaagaggattggcaaaaacataggcagggaatatcggcaaataacagttatgtccagttgcttcttgcttagacgctgtttgaagaacccaagcaatcatgtcagcaaatcccctatttcagacttggaaaggatgatcaatatgctctcagaaaaaattgtcaaagcgttgaaccaccagatgaatatggagtttcaagctgcccatgattatatggcgatggctgcctactgccaccatattagttacaatggcttcgccgattacttccttaagcaagctgaggaagagcgggaacacggcatgaaagtgtatgactatttaaatgacaaaggccaaaaagccgtctttgaggcgatccaagccccaaaagccgattatggttcactcgtcgccacatttgaggctgcgctggcccaagagcgggaagtaacgaaaagctattataaagtgtaccagatcgcccaagaagaacaagaataccaaacgctttctttcttaaactggttcctcgacgaacaagtagaagaagaggccacatttgaaacgcatattgattatttaaaccgcatcaaagatgatgccaatgctctttatatttatgagcaagagctgcgcaaacgaaaagaagactaacaatggaaagccgctttgcttaggcggctttttgttgtttcccgcctcgctcgcccaatcgaataagtctgtggtgacataggctagcggtaagaaggaagaggggggacttcactatgtttccgtttcgacagggaaaagcaaacatgcctgccacaagaccactgcctcctgcaccaaggccttttgtacaagaatacattgttcaagaaatccagcctgtcttaacaacgtacgtcacaaaccgtgtctaccgccatgtgcacactttcccgcactcagcatccgttgccaatgtcgtccacaatcaacaagcttttccccctacgcactatgttccaggccgacctcctcgctaagcgaggaggtgaggttgttggaaaggccggcagcgtgaattgcctgtatcggctggctatatttcctcaaaaccgtccattctcgttaacctgatccaaaaaacgttggacttctttccttgtctttagtatgacaacgcgctttcgctcttttacttgctcaagcgcttgaatcactttgggcctgcttctcttcttataattccaaacccaaacaaaaaaagcccaatctagtttttcagggcaatcctcgttcaaatcaggtcttgtttttccatgataaatcactcttctttttataatcctatagatgcataacagtctaggcatatctaaaaatatgacggcatctccttcatgcagcctcatgtcgagcgtccttgaataatttccatcgataatccatttattttggcttaccgcatctttaagaaacgcatcccattcttcgtttggggttggcgtccagttaggcttccaataaaatcggtctaaatgaataacgggcaacgataaacgttcactaagttttcgagacaaggtagatttaccagagccagctgatccaatgacaacgattcgattcatccctttatcctccttgctctattctaagatacatactcctgatcctattctaaaatgcccatcaaggctccattcaagttgtttccagacacaataaagcaggctagatgccagcctgcttttaaaataggaatctgatacaaaagaaagactctaattttttatagaagaatcgatagccattacttatcctacaagcatgcccgcaatggctgcgttcattaaattgacaagcgttgcggcaataagtgctttcaacccatatttagcgattaaagggcggcgttctggcacgagaccgccaaggccgccaagcaagatcgcgatcgagctaatgtttgcaaatccacacaacgcaaagctcgtaatgacatatgttcgttctgatacctcgcctgcagccgacgcaagggcatcaaaaccaataaactcgttgacaatcgtcttttgcccgataaacgagcccgcttgcacggcctcttcccatgggacaccaatgatccacgccaccggggcaaacacgtacccgaggatttgctctagcgtaatggaaccatagccaaaccatccgccaatcgtacctaaaaacaagttgatcagtgcaattaaggatacaaaggcgatcagcatcgcgcctacattgagcgctaatttcagtccatccaatgccccgtttgaagcggcatcgatcacatttttggactcgcgctcgacttggaaatgaatgttgtcctttgtttcgcttatctctgtttctggcacaagcattttggccatcaaaagtccgcctggcgcagccataaacgtcgctgcaattaaatattccagcggaatgcccatctgcgatattcctgccattacggagcccgctactgtcgccatcccacctgtcatgacggcaaaaatttcagacgacgtcattttgccaatataaggtttaattagcaagggagcctctgtctgcccaacaaaaatattgcctgtcgccgatatcgactctgccctgcttgtcccaagcaacctggcaatgccgcctcctaagtatttgacaacaaactgcatgatgccgaaatgatagagaatactaataatcgctgagaaaaatatgatcacaggcaacacttgaaaagcgaaaacgctgccgactccttccgcttgcaggacaccgccaaagagcatatcaataccagcagccgaagtgtcaatcgccgcttgtacagcgcctgtcacttccttaagcacataactccctgcatcggtccataagacaatcaccgcaaaaacgaattgtaacgccagagccgtcaaaaccgttcgccagttaatcgctttcctatgtgcagaaagcaagtaggcaatcccaagcaagatggccattcccattaagccccataaaaaattcatctttacctcctgtatggtcagtcgtacccgacttttgcttactattcccggtgcgcgccaatttttgcacgttttcctaaagaaacgcacacaatatggctaagcttatgaaaaacggctggcactgtcaaccatcattcaagtaaaaaaaattatcaaaaaaccccacatccgttgcttcctttttccaccatccatgattcctacgactctcttttcttgttacacaaaaaaagcctcttgactcatttcgtcaagaagctttgtgctgttgcagaaaatcggccaattcgtgggtgtgctgctctgatcctttaccaaggcagacaaggtggccccacgtatctaagcagactagctttgaagaacgaatccgttcatgggcataatgggcatgctccaaaggcacgattgcgtcatttttgctatggacgataagtgtgggcgccgtaatcgtttctaattcttcctcaagggactgacgcatatgctgcaagtcgatataaaagccatgtccggagcgctgaaattcggtcattcgatcaaacaaataccagtccctggcgagcatcctctgtttaatttcttcatacgaaagtgtgctgtaagcaggcgcaatttttttgaatgcataatctggtgaaaaccgagttaaagaagagaggctccgccagacaaaccgctcaatgaaaggatggaataagaagcggctcaatactgcatcacggacactcgcttcttgccacggcttcgtgacggccccttgcaatgtaaatgattgcactctctctgggtagtgactcgctaaataaatgccagacggcccgccagtcgacgccgcaattaaatggactttatcaatattcaattcattcaatagttcaatataaaagctgcacgccttttcaagcgacttgccaatttgccttgatgtttgcccatatcctgcccgcgatggcacaattacggagtagccgttttgcgcaagctcctcaatccccagttgttccaagcagttggaatggccaccatgcaaatataaaactggctccccttctccggttatggcgtattcaagcgtaaaatctgaatacgtaaaagaagcgatgcctctttccatcggtctctatcccctttatatttatgataatccttttttttcgaatcgctttaaatcgctgttttcgcctgccaaaattaaaagatcattttcataaatgacctcctcaggtgacaaatggatattcagttgcccatttcgtttgtagccaattaatgtacagtggtactttttacgaatgtttagttgggcaatggtcttattagctatcttttccgtcgcggccaactcaacaatactgtgctcatccgacagttcaatatagtcaatcactttagtggaatcaagcaaatgggcaatacgaatacccatttcatgttctggccggatgatccggtcggcaccgactttctctaaaatacggtagtgtttcgcattgcttgctttcacccacacattggcgacgccgagctcctttaaaagcaacgtagcaaggacgctctcttgaatatgttcgccaatcgccacaacgacataatcgaaattgcggattccaagcgctttaagagtacgctcatctactccatttgcgacaatcgcttttgtcgcatagtcgctggcaaactcgactttttcttcagaccggtcaatagcaagaacgtcatggcccattgcataaagctcttggcatacacttgtgccaaaacggccgagccctatgacagcaaactgtttttccactttgtccctcctgaatgcaggcaagattttaagtctaagagtgatcttactcctgtagcataagaaagtcaacgcgtgctcagcaatttttatcttttctttaggaagtgatggattatattcattcgctatattaagatttttgtttattatagctagaaaaaatgatattctaactattcaacttaaatgccagtcttttttatcgggttatcggggtttaccgtcgactaatcgggggaaattgaaaaagagtctttctccttatccatacaacgtacttttaactgcaggaaaggtggtttgcgcatgccgcaaaactctgacacaacatcaaaaaaatccccctttgtcctctatgcgtctgcaacaggaatgacattattcgtgttgtggggcattgtgaacccttcccacttaggcgctacagcagaaacggccttagcttggattatcgacaacttcggttggttttatatgaccattgccagcattttcatcctttttggttttattgtggccgttacgccttttggcaaacttaggctcggcaaagacaacgacgtgcctgagcattctttcatttcatgggtcgggatgctgtttgcggctggcctcggtgttgggttcgtcttttttggtgtagctgaacctattctttactatatggatccgccacctggctattcgttccacttgccagaagagtccgcgaacgctgctgcgattgggctccgttacggcgttttccattgggggctccatgcttggggggcattttcagtcgttggcttaacgcttgcctttgtccaataccgcaaaaatcggccagccctgattagttctgccttttatcccattctcggttcgaaaacagacggttggatgggcaaaacgattgatttgcttgcggttatttctacttgtgcaggtgttgcaacgacatttggcttaagcgctttgcaaatttcaggtggcatttcctttttaacgccattgtcgaatagcattcctttacagctagcaattattgccgtcatcacttgtttgtttttattttcggccgttgccggaatcaataaaggcattaaacggctcactaatttgaatttggtccttgcgggcatcttactgttattcgttttatttgcaggaccaaccattacactgcttgaaagcatggtgacgactttaggtggctatttgtctaatgtcgtgtcaatgtcattaacgatgacgcctttttcaaatgatgaatggctagggtcaaacacgattttcttctgggcttggcatatgtcatggtcgccatttgtcggcttgtttattgcacggatttcaaaagggcgtaccatccgcgaatttatcgcaggcgtcctgctcgtcccgacgctcatggcagtcgtttggttttgtgtgtttggcggtaccgccttacatattgagatttctggcttgttccccctcgcggagattgctcagtctgaagtggagcttacgctcttctatatgctgcaaaatcttccgttcactacaatttcgagcattttagccgtcattgtcgtcggaatcttttttgtcacttccgccgattcagctgcgtttgtacttgggtcgatgacatcgaacggcatgcttaatccaagctttaaattaaaaatgttgtggggcgtattaattgctggtacagcgtctgtcctcctaataagtggggatggagggctggatgccttacagactgccgcattgacggctgcactcccatttgccatcattctcgtctttatgctgttctcgattggcatgatgatcgcgagagactggcgaacagagcaacgaaaggcacggctggcacatgataaagcattgaagcagcgtctgaaagaagaagcgtacgaagagttgcgtcaggatttgagccaagagtggcgtgatgaactccgtcgtgaactactggccgctgggcgcaacacagcagaaatgctccacttccaaacgacagaggatacggccattgtcggcaaaacacttgctgaagtcggtttccctcctcatgtcaatgttagtgctattgaacggggcgatgatgtgatttccccttccggaagcactgaaattaaagcaggcgattatttgtatatccttgtagaaattcagcaaaaagaagcgttgcaggcgattttacggcaaacgaaatcggggaaataaacatgagcgcgaccgacaagcaaaaaaggagttgtcccaaaaggtcatagataaatgaccttttggggtggcttttttgcatttagataaaaaagcacaaaaaaaccgcccaatcgtttaaaatgaaggtaccactaccaaaattcaaacgattaatatgggtttgaaaccacgtgctctgcacgtgtgaaaacgaaacttctagagaggtctagtgatgaaaaaatctccaatcgttataatagaacttggccgccaaaccaacttctatcaacgaaaggagatctcacccatgagtgacaacagtttatcacacacaagatggaattgtaagtatcatatcgtgtttatccctaagtatagacgaaagattgtctatgggaagctgcgaaaagatattggagctattttgagaaggttatgtgaaatgaaagatgtagaaattatcgaagcccatgcgatgattgatcacatacacatgctggtgaaaattccgccaaaaatgtcggtatcgtatttcatggggtatttgaaagggaaaagttcgttgatgatccatgatcgtcacgcaaacttaaaatacaaccatggaaatcgcacgttttgggcaaaaggctattacgtgagtacagtaggactaaatcaaaaaacaattgaaaaatacatccgcgaacaagaagcggaggatcgattgcgcgatcaaatgacaaagagggagtacgtcgacccatttaaagataagtaaagtaggaaacggttggcggtcccttcagaggtccctttagggacttcgttggtaaagtgcccttatagggcgaaattaaaaccgccggttctaccggcggatacttactnnnnnnnnnnnnnnnnnnnnnnnnnnnnnnnnnnnnnnnnnnnnnnnnnnnnnnnnnnnnnnnnnnnnnnnnnnnnnnnnnnnnnnnnnnnnnnnnnnnnttggctggggttggccctcaatctgaagaaaatggcgggtcttgcccgccatcattcaccgaaataccgatctatccaaataaaggggagtcgagatcaagtcagatctcgactccccttcttcattttaaaggcttttgggacaacctcttctttattcacggttaaaacgatattccatctcaataaaatcataaacgttgcctttgatttcccgcttatgagggcttcttttttcaaagccgcactcttcagacacatgaatggcccgtttattatccgcagcaacgaataatttagcagccattatctcttcgaagttgtgtttaataaaggacaaacaattttgcaaaaatgaacggccaaatcctttgcctatgtagtccggtttcattccgagtccgatctcggccacatcctttttcggtttgatcccaagaaaccctaccatatcttcgtctttatagacggcatattgtcttgcactgctttttccaacatcgataaatgcgtgcaatccaagcttttcaacgtcagtatgataaaaagcataagcgccctcatattcccattggtaagcaagccatttcgcttggtcttctgacatggctacaaagcgcagttccatttttcgcgaagcctccctttcacacccttttcctgttagtccatatacggctgtctttcgttcaactgattgcggataattgaaaattgttctagcgtattccggtttgccgatagcggcggcaaatcatcaaaagaaaagaagccaacgttgctcgtttccacgcctgttgttgctgttcccccggtgatcgtacagtgcaaaaccaacttataaaaatggaacatatggggcggatggcgatgttttttcgtatcgaacagggcaagcacccgctcgtatttgctatcataaccagactcttctttaatttcttttacgatgttttctgcaggcgacaatcctacttcacaataccctcctggcagcgcccacgtgccgtcggtttcttcttgcacgagcaaaatatggttgtcctttatgaccacgcctcggacatcgattttcggtgtctggtagccgttttgttggacaaacgtttccttcacgctcgcagcatcaagatttttcgcacatgccatcatctcggcgcttatggccaatagctcgtcataacgttccatgtcgtatttgtcttttgtaaatgtgattcccgcctgcgctaaggcttgaatacgctgcgcccagttaagccaatctgaattcacccgagtatcctccttcttcttgctgttgatgcaacgcaaagaacactgctctaaataagttgcggctctcccttatcgccaagtttccgtttgcgtatccatttttactagtgcccctccctaaatcatatcaataattagccttgctgcaacccttggaccagagcccgcttgtggtcgttcccaactcgttaagatgaaaaacaggcatttgacgtatacgaacgacaccggacagaaacactgttagtaaaaaggaggaacatcccatgaagcattccttgctgttgctttgcaaattcatcgcttcctttattgcgtttacaattggatttttttatttttcagaagcgacctttgttgatgtcactacatttgcgctcctcgtcaccgtcgtttcctacatcgccggcgatttgtttctgcttcctcgctttggaaacacgattgctctcgttggtgattttttgttcacatacttggctgtatggattttcgggtccgttttgttccataattacatgctaattgcctgggggagcatcctctccgctttcgtcatcacaatcggagaagtttttgtgcaccgttatatgttaaaacattcccgttctgttaaatcaaacgagagtacgcaaacacgttttgcttttaacacagagttcggcgaagacgaggactattcgaagatacaaaagaaagaggactaatcatcctctttctttttgaggcttcacaagcatagaaaaatggaggtggagagggaaaatgccctagccactgcctcttctaaggacgcaagcgaagcgccgccccttttagccgcggtgcttttttctgtgtttcctttggaaaaataaacgtccacggcatgcttacgtgaggcttcaagccaaggcgttttagcgaaaaatgattggctgccacttcctcgccgtcctctaaatagacatactcccgctcgtcatttggccactccccgtcccctgtatgctgaacaagaaccgttaccaaaagatcgccacggtggttaagcgcttgccatagcgggagaaatggctgcagttccccttgctgggctgcaaacacgtttttgatggcttgtacatccttctccgaaatcgtccgttgccaggcctcttcaaatttaagcgtttgcatcaagtgattctcctttcaattgtttcacatagcagcggcattcatgaacacgtgtaaaagcgttccgtacgtcctcttctcggtcaccactatagtgggcaaaaacgcctactggtgtaacgccttggcagtggctatgggtactccttttcgcttcttctgcgtccatgtaaacatgaagatagctcgtgtgttgtctaaaaaggtggcgtttgtaccattggttagccgccggatcttccctcgtccatgcttctaagtaatcaagtctgtgtccgtgtgctgctttttccacttcagcaagcaacaaggaggcgatgcttcttctacggtaatcaggatgaacggcaatgtgccaaatcatgccgcccgttccctcttttaaggaacagacagggcggctatcgctatcaagctcaacatcaataagtccgactagctggcccgcttcgacgcaaaccaattcaattgcagggttacggtacctttctttcgcttgcaagacattgtcgtaataaggcgtgtccaaaaaagcaagcacccgcaagcgcaaccagtctctctcgtcatcagcaacataagggcgcactttcactgtcactcactctcctaggaattggtcgtcatatgctcttcgtacttgcaggagacccttttccatgttttccaagctttcaaacgcaaaagaaaagcggatcgatgcctgtctttcctctccgtaaataaatccaggatgaagaacaacgcctcttctgtggcaagcagccacaaaacgttgcatatgaggcgctcgctcttttttaaacgtaaaccaaatgaagaaaccgccttgcacgtccccccatgaccctagttcgccaaagtgtttctcgagcaaaccaagtaaccagtttttccgctcccgtaaatgttctttcaacgtccatatatggtggcggtacgtacccgtttccaataggtgacggcaaacaaattgggataacatgctcgaaccataatccgtttgcatccgcaagtcggccaacttctggacaatatcaggcggtccgactagccagccaatccgtaaacctgggctaaccgtttttgaaaaactgcctaaatacagtacttggccttttcgatcataggcttttaatggcttcggcccttcttcaaatgacaaatcgccataaatgtcgtcttcgattatcggcgtccttgttttgcctgcaagcaaaagcaacttgcggcgcgccccttcatcaagcgtcattcctgttgggttgtggtgtgtcgggttcacatataacgcatgggcactctgcttggccaactctttttctgcatcgttggctgcaaaatcaagaggcgacgtccggatgcccaggcttgtgaaaaacgttaaagaccgcaaataagaaacaggctcgtggaacaacacgctgcccgtctgcaaaatccctgtgcctattaactgcaagccgccgagcgctccggaaacaattaagatcgaatcaggagatgcttgaatccccttttcctgtaagtacacagatagtgcctgtcttaacctttcatcccctcttccgtcgccataaccgaaaccaacattttgtgcagccattgccgtgagcgcttccttgattgcattctttggctgcaattcatgagcaagcacccctttgcttagctgaataagagtagcatcgttttcccattcgttcaaatgctggacaagcgctttgtttttcggataaaacgaccatttcgccaactctttccacacaacgccttcttcattgccagaatcgttgctaacaaaagagccttttccttgaatcgaaacaataatgcctcttgcctttaaacggtctaaagctgctatgacagtgcttcggtttacctgataataggcagcaagctcttgttgggtcggcagcttcatcgtcggataccattcgccagcttcaatttttgcgcgaatgtcagccgcaatttttgcactttgccctgaaatgatgctcactccttctagttgttggttttattttctcataagttgttggtttctccaaactagatttgccttaggctagacccactagctaaaaaaggaatgatcaccatgaaactcatttttgtttacggaacggctgtccttctgtgggcttcggcttttcccgccattcgtgcgagtcttggctattactcacccgagcaccttgccgctttaaggcttctcattgcctcggctgccttgcttctctttgccttggctgcgcgtatccctttgccgaaacgaaaagacgtgcccgccatttttttgcttggcttttgcggcttttctgtttaccatggcgcacttagcattggtgaaaaaacggtcgaagctggcacagcatcactgcttgtgtcgacgacgccgcttttttcagcgctgcttgcagccctgtttatgaaagagcgcctgcacctaaaaaatgggattgcttctttcatagcatttctagggattgggatcattatgctaggcagcggcgcttcgtttcatttgcagctaggggcacttattatcctcgtaggcgcttttggcgaaagcatctattttgtttttcaacgccgccttttgccgatatacggttttttgccactgactatttattccattttaacagggacgctatttatgctggcgtttacccctggcctagggcaaatggtgttagcggcaccttcctctgtcaattggaccgttttgtacttagggcttttcccaacggttattccttatttttgcctcgcctatgctacggcaaaagtgggcgcctcagaagctacgagcactctgtttttaacccctgtcgtggcgcttttccttgcttggctttggctcggggagacacctgccctgttgtctcttgcaggcggtgcacttactcttgcaggagtggcggttgccataaccggaaaacaacgttaacaatacggcgaaatttgcatagttattgctcgccgaatgatcgcgacagaatcggcgcctttttgaaattgataagacacgcgtttttccacgacagtatatcctttttgccgaagacgtttaaaaagagggtccacatggacggaccgtttcccatccaacgaaacaagcgggaaaacacgcacttcttttgccactcgtagcaattcatcaagtgtagactggtggaaggcgcgatcaaactgttcgctgtatgtgaacaaaaaatgagctgacaaaacaaggtcaaacgtgtgattggcaaatggcagctttggcaaaacagcggccacataacgttctggccgcctgtccatatcttctgtcgccaatagaagtgcctgcttccgttgggcagccaacgctggaacgtcggcaacatttgtccagatgtaatcgtttttagcttgtttgattttatcgattgtatgaccaagatccgctagccctttttgtcgaatcattgctggcgagagctgataggccatatcgcttgctgttgcatctatgcctaaatcagcagcttcctttgtaaaagaacaagcaccggccggacagtcaagtatacggcgtccttgaagcttggccatatctaggccaaacatggccacatattcagcaaatgtcctgccgataaacacaactcgatctaattctaaactcacctttactcaactccgctaaattaaaattggtcaatcgctacaaacagtctttcctcaaaggccgactgctttctttatttcctgtaagaatggctggctatatgctctagcccgttccgcccctttagcgagtaggcggtcaacttctggagatgccaataactcgttgtacctacgtctcggttcgctcataaactcatcgatcgcccaatacagctcttttttaacttccccccaaccaatgccctcagcaaaccgggcccgcatcgcttccacttgccgtggcccggcaaattctttataaagagtaaacaagttggatgtctctgggtcttttggcgcttctggcggcagtgaatcggttttaatccgattcacgagccgttgcagttcgttcgcctctgaaaacagagggatggtatttccatagcttttgctcattttccggccatccagtccagggagaacagcaactttttcttcgatatggacacgaggcagtttaaacacgtcgccgaagatatggttaaaatgctgcgctaaatcacgagcaatttcaatatgctggatttgatcgcggccaaccggcacgacatctggctggaacaacaggatatcggccgccattaagatcgggtacgtaaacaaccccatattaacgccggcatctgcttcttttcccgccgccttgttttcatcgactgccgctttataggcatgggcgcggttcaaaagtcctttcggcgccatacatgccaagagccaactaagctcaaatacttccggcacatcggattggcgataaaaaaccgacttttctggatctaggcccagagccagccatgttgcggcgatgcctcgtgtcaattgccgcatttcttcgctgtcagtaattttcgtcaagccatgagcgttagcaataaaataaaacgattctaagccaggctgtttagcaaatgtcagcgctggcttaatcgcgccaatgtaattgccaagatggacttccccagttggcttaatcccagtcaaactccttgtcgccattgcgtttcctccttttgcttttaactatttttgaacgccaaaaagggctatccatcctaaaaaaggacggataacccgcggtgccaccttcattcgctccacaaaaaagcgcttctcaagacgcacagaagtctactgcttcaatgcgctgccttttttaacggcaaggcacccgcttcgcctactctctctttcagccaagaagctccgaagcccattccgccttgctcctgcactgatttccaccaaccatcagctctctaaagcattacacaacgcgtacttactcttcttcatcgcctaaacgttttttctatcatagccgatttgatcaaggcctacaagggaaatttgctcgcttgacgttctctttttttacagacatagaccatttcactgctatcgtttgttataaccgtctcgttccagtctttataaacatcgatgatttcaaacccgtgggctgttagaagccgctccatttctctcggaaacgtgtagcgcaaacgaatgttgcttcgtttctccttaataatagcgccaacgttgtttttgtattttcttatagtaatataatgttggatttgcttgagcgcgtcgtactcactcaccgtataaacatcgactggaaagctcgtttcccgatctacgtatgtccgccaatactcctccgtgcagggttgaagcaattcttcctgattcggaaaccgtgtatcagaaatgaatacgccgccgctatgcaaatgcctgttgacagaagcgagcagctgattctgggcttcgtttgttaaaaaatgttgaaacgaatggccaacacaatagattaatttgctttttagccgcagattcaagtttgtacagtcttgctcgacccatttaattggtaggcggactgcttttcttctcgcttcatttaacatccctttatggacatcgacacctactagctcaaaccctttttcagccaatggaattgttgctctccctgtcccacatgccaagtcaatgataagccccttttgtttggctgcccattttagcaagaaggggatttcgcttttgtgttggccattttcttgatcatataatagagggtcatcgtactcctcgaaattgtcaaaatcgatcatttcactcactcattccgtctttatcggatcttttcagttacaatcgcacggcgagattatgcacatcgcaaccacaaacaacgaagagattcgttttaatttcttgtctaaagttcaaaaaaacccattgttttcacatcggctaaagaagatacgtagtcatcaatgatgtaatcttcaaaattcgttttctctacctctggcaagccggcgaaaaaggcgaccaagttatatagtctgttaatcgtgccaccaatataacaaccagacaccgtctcaaaatcatctgtttctaaaatgacgagtgaaccaattgtaaggatcgtgtcggtatccgttaaaggaacggatctttgagctaattgttgaaaggccctatcattgacactttttactttgccattaagaagcgcagtaatggacaaatcatataccccataaattccacctattttattcctttcaggtatctcatgctcgatcaaaaatggtttgagatctttatcagacatggaaaggaatttcgcttttaaagtattgataaaaaaatcatcgacatcttcgattggccaaggtgtatgtttattttttgttttttggtataacgcatatttattcaatttagtgattccccgtacgttcccaaatgtaatggacaaacattactttttcgccattgaattcaaatgtttcctcactagtgccgacttttttgaagccgttgttttccatcgttttttgagaagcgatattgttgcttgtcgtttttccttttattgcttgaaagcctgtttccgtttcaagtaactgttttaatgcattagaggcaattccttttccgacataatgttctcctactctaaagccaacttcggccacacgcttaggctcatcaatcgcaaccacattgattctgccgactatggttcccctttcatccctaattaaataaaatctcgagttagtgtcgtcttgttcagttagcagtactctatgtctaaccttgaacgtttcaaattgataatatgcttcgcctcggctcggcaccatttgttcgaaaaaagcccgattatccgtttcaaacttatataactgttcggcgtcgctttcttgtaacctattaattgatatttccacgtataatcattccttcaacatttttccctctcgtttgcatcataccatgtttccaatgtctattcatgaatgtttcgacagttggctaaccatgtatgccgcgtcttcccccactcctttgacaagggcagaacctcgtttatattgccaacttaaacctacaaaaaacaatccgtttacatttgtcacacctctaacgtgaatgggtttttgctcctgatcgaaaacaccatcaatatcaatccacgaataatcatttctataccctgttgcccaaataatcgtgtgaaccgaaacaggagaaccttccgcaaaataagcctttgaatcagtcacgtttatgaggcgcccttttaatttcgccctttttctcactgtataaaaatcgtttccgataattggatctcttttttgcagccattttccgagtggagaatggaccgttgccttcgaaaggccaagcttatcaaaccaccaaaataaatttttccctaggacagactggggcaaaacgttcggtttgtttccacaagcgagtacgacatcgtggtgctccactaattcagccgctatttgcactcctgtattgccagcaccaacaatcaaaacggggccagcaacgatttgttccggccctttgtaatcaaaagcatgcaattgggcgattccaggttggatgctgttggcaagcggtgggataaaaggcgtatgaaaggctcctgtggcgataatgacttgcttggcgtcatagattttcccctcacttgtccacaccttaaagcgatcacgcgttttctctagcttttctacctttgtctcataaacaactggtagctgaaacgtttctttatacgtccataaatagtcggccatttcatcttttgacggataaccgtttgggtcgccgctaaagtcaaggccaggcaagctgctgtaacaccttggtgtaaacaaaacaagggaatcataccgttttcgccacgaatcgcctgcctcgttttgctcatctaaaataagaaatggttgcttttgcttttttaaatagtaaccaactgccagacctgcttggccgccacctataacgactacatcatactccatcatgaccaaccctttcctacaaaagtccaaaaagttgcctgctacccaaatggcctactcttttacaccgatgagcctcatgctgtttaaagcaaccaatagcgtagcacccatgtctgagagaatcgctatccaaagggttagccatcctgggacaacgaggagcaatgccgctagtttaataacaattgcaaaggcaatgtttgctttaatgatattcaatgttttgcggctcagcttaactgtaaaggggagcttctttaagtcgtcccccattagcgcaatgtcagcagtctctaacgccgtgtctgtgcctgcttttcccatagcgatgccaactgttgccgcagcaagtgcaggagcgtcattgacgccgtcaccaaccatggccacatttccatgttttttttgccactgtttaataaaacgtaatttgtcttcgggcattaactctgcctgaatatcagcaacgcctatagcttggccgatggcatgggcagtccgcttgttatcgcctgtaagcattactgtctttgctatgcctgcttcatgaagtttacgaatcacttctttgcttgattggcgcacttcatctgcgacagcgacgatggcgagcaactccgtttctgtcccgaccagcatcgctgttttcccttgttgttgcaagctttggatgttttgcgcaaatagcgttatatcctgagtcggcaaccgttcttggaacagcttcggactgccaacgtaatacgtttttccattgactattcctgtaatgcctttgcccgtgagcgccgtgacgttctcaaccatataatcgtgataaggcagttgttcgtcttctgccttggcgacgatggcagaagccaaaggatgttgcgaacgattctctaatgccgccacaatcgcaaacagttgcctttgatcaagttggggattcaataaggcaaagtcggtaacaacaggggcacctttcgtcaatgtccctgttttgtcaaatgcaatcgcttttagcgatgccatttcttctaaataaacgccacctttgacaagcaccccttttttagcagcattgccgatcgcagagacaatcgaaatcggcgtggaaatgactaacgcgcatgggcagccgacaacaagaacagctaacccttgataaacccaagtactccaatttgctcccgtaactaacgggggaatgattgcaacgagggcagcgaccaccataatgattggcgtataatacttagcgaatttatcgacaaacgcttgtgccggagcccgttcaccttgcgcttcttcgacaaggtggataatttttgaaatcgtcgtgtcctcgactagctttgtaacttcgatttcaagcagcccttcttcatttaacgtgccagcaaaaacctcgtcatcaaccgccttttccacaggaaccgattctcctgtaatcgctgcttggtttacagaagaatggccacgcacgactattccatccattgcgattttctggccaggtttcacaatcatgatgtcgcctacgacaatatcaccaacatgaacagtcaactcttggccattccgtttaatgagtgcttcatttggggcaatgtccattaacgactgaatcgactttctcgcccggtccatcgaaaatcgttcgagcgcttcgctaatggcgaataaaatcacaacgactgcgacttccccccattcgccaatgatggcaccaccaatgacagccaccgtcattaacgtcttcatatcaaattcaagctgcgctacatttcgaattcccgtttttagcaaaggaaagccaccgacgagaatcgctgttaaaaacaaaccgaccgttccgatattcgactcgccatatttaaattgaaacacgtagccaaacacaagcaataagaacgataaaagaatcgcgcgatgttttttataaaaaggaacttgtttgtattgaaggggctggcgccggctcggctcctccattacttttaactgttcaaatgcccctgcctcttcaagctcttctgtcgtcgcctctccgtagacggttagtttcgaggcgccaaagttcacttttgcatctttgacccctggcaagcccttaacgtttttttcaaatttccctgcacagttcgcgcatgtaaagccctctacacgatagacagaggcatgttcatcccccatatcctcggcccccttttaaaactagctccatcattcaaacatttatttgaatgttagtgtatcgacaacgatacgctatgtcaatctattattcaaacatttatttgagtgatgccgcatttgcccgtgcaagcagagaattgacaaaaaaacagaacctgtctaaaatgagtgacaccatttttatgacaaaggaggggatgaatgtgaacaagaaagcaaacgacagcgatcattgtgacgtgttttgttatgatgaacagaaagtgaaacgtgtccaagaaagtgtaaaaaatgagccgtttgcgcccctttctgctatgtttaaagcgttagcagacgaaacaaggctaaaaattgcttatgccttaacaaccgaacaagagctatgtgtatgcgatgtttcccatatcatcggcagctctacagcaacagcatcgcaccacttgcgccaattaaaacaagcaggtgtcgccaaaagccgcaaagacggaaaatgggtattttattctttgcaaagtccccatattgccgcttttattgaatattcatttacacaacaaaaaacatcggtttaacattgctttttctaaaagtgcgccgtttttcaaacatttccccctactaggagcttggataatacccgcaaccatccctcgaaatccggtcatgagatcgaattcaagcgtgcgaaatcgtcactacctgaaacaaatggcaaacaattatgtcattttccttgccaatgaaatgccttttaggtaaccttttcttaatcaaacatataggggtggttcaagtgcaccgaaaaaaagtcccccgttaatctcgaggtcctccattcatcgttcatgtcacacactcaaattgaaacaaaaggagatggaagtgaatgaatatgaatggacctgcatcaatggcgcaaaaagaaagacttcaaacttgccaagaaattgccaagagattacacgaggtttatggcaacgacgttctcgccattggcgtctacggttctgtgtccagaggcacagatggccctttctcagatattgagatgttttgcgtactccgtgactcggctgaaacggtagataaaagttatgaatggtcagctggaccgtggaaagcggaagttaacgtttgcagtgcgagtatactgttaaaagacgctgcaaccgttgaagaccgatggccgctgacacatgggccttacttctctccgcttcgtctctatgatcctgaaggcttctttcaacgcttgcggctcgcagcggaatcgccgacaaaagaagatttccgccaagctattcatgaaattcttgtaggggaaatgtatgaatatgttggcaagcttcgaaatgtaaatcgaaatggcccttctacctacttgccatccttggcattgcgctttgcccactatggcgcaatgttgatcggcctccacaatcagacactcttttctacgggcgctatggttttgcctgaagcgctgaaactgccgcatcggccaaaagggttcgaccatgttgctgagttagcgatgtctggagacttagcacaaccagcgaagatcgtgtcagcgtgcgaagatttctggaaaggcctagtcgcgtgggcagcggagcatgattacgtcattcactcaaaacgaatcccgttttgagcaatgtaaaccgaacattctctgtaaatgaacggagggagcttcccatacggagaagctgcctttcaaatttattattctttccgtttttgatctaagatcgcatacagttcatccagctcttcttttgttagtgactcttcctccaagaactggaccaacaatggttttactgttcccccgtaaactctctttacgaaagactgtgcttctgcatgcttacacgcttcttctgagtataggggaaagaagacatagattttctgctctttatctacgcctactactttcttcttcgttaatcgatcgagtaacgtccgaatcgtttttggtttccagtccgtttgctcttggatcgcggaaatgacttgattggctgtttgcggcccctttttccacaaaactttcataacttcccattctgcttccgatatgctaggtgtttggtttgacatctttccctctccttttgtcacaactaatcaataaattcctttgcttgacagaatggataaagtgatttcagcagccgtgcttccatatgcatgatcttgctgttgaatgtttgtcgcaaaaaagtacgtatccgtttcagtttcgacaaatccaataaaccaaccatttattgcatggccgttcacaatgccagtcccggtttttccataaagcgttcccttttgattttcttcaagtttcataacctctttaacgaattgcacatgctcttctttaaagtccagttggtttgtatagaaggaatggagaagctccacttgttctaccggtgatattttcaaggaagattccagccaatagtgatttaatccaccggaaagatctttattcccatagtctaattggtttacaaaagattggatgttcctttgtttgatccgctcgtctaactcttgaaagtaccaagtgactgactggctcatcgccgatttcaaatcttgcccgctattccaggcttcatcctcgtattcgactccatcccactctaaccatgaatcatctcgcccaatcacgcctagttccaatgccatgagcgcggtgtaaattttataggaagaattgggggagactcttcttacacttttttctttattatagatttcgaactggtcgctgtttaagctatataatacaaaactaccctcatttcctgcaaaataagtgctgtaatcttcaacaaccgcctggctttcatcaaattggtagcgctctgtagaaacagcggttgccgttaaaaaaggaaattgagcaatgacaaaaacggtgagaacagcaaaaacaaccatgctttttaattggcgccgctttgactcgccagtaaaagaagcaatgtttaagattcgtatttttaaagcctttttcgaactatgcagttggttcgttaagtataaaaatcgagaatttctttccagaaaacgcatgatcgtctggccatacgctttatactcccgctgtcccaatgtaagcaagacctccgtatcacaagctaattcccgatcaagacgcatctctttaaaggctttccatactaaaggatgaaaccaataaacaatttggtaaacgacaaatatatagttcactttaatatgtttgcttttataatggtgcaactcatgcaacaacacatgtctgatttcatcatcagatagatacaattcgatatttttgggcaacaagatgtacgtctttaaccatccaaaggtcattggcgtttgaatggcaggggattctaaaattgttaatttattcgttatttgcaattctgccatacaatcgctaaacgcgttttcgactttttgattttgtatacgacttgccgcttttactagtcgttgtagctttgcataatggtataaagtcaataaaaggaaaaaaatcattccaccaatccagatggaaacaaacactgcatgaatgaatgtatcgtcaaagcgactaacagacgtgccaaaatcaaccatccattgctcattttgatccgcaaaaccgaaacgcttctgtgctgaaggggtaatctgttgacgcccctggtcaaaaaaagacaagcccgtcaatagatgaatcggtataaacggaagcgtcaacacagtaatgagtaaaaaccataaatgataacgccattttgctgataattgtttataaaaaaccgctcttacaaaaaagatcactagaatcgttgccgttattaatacaagagaaagtaaaatatgcggtaacgtcatttttatccccatcttccatccttttgcttctgactccccacacttcataaccacaaaaaattgtagcattcccatccgtgaatgtaaatttctgttgacaaaatagactacaaatgtaatattggattacatgcgtagtcgactcgcatcacatgctatgaaaaggagtttttttatgctgaaaacaaaaatcacgtcgtctatccttgtaggtgcctgtttactgattggttgttcgaatggcaatgagcaaccggtttccaacgaacctgaacctgaagagtctgtcgagacgggagaggcggtttttaaagcgttagaagaagagtacgctgcccgccttggcgtatttgctttagacaccgggacaggacaaaccgtttcctaccgctccgatgaacgcttcacctatgcgtctgcccataaaccacttgccgttgccgttctgcttcaacaaaaatcaatcgaagagttggaacaattgattacgtactcggccgatgatttagtaaactacaatccaattaccgaaaaccacgttgagacaggcatgacactaagagagttaagcgatgcttcgattcgttatagcgataacacggctgcaaacttcattttcgatgaaattggagggccagagggctttaaagaaggacttcgagcgattggagacacggtaaccgaacctgaacgaatcgaacctgagctcaatcatgttgaacctggagagatccaagatacgagtacaccagaggcgttggccaaaagcttgcaagaatttgctttaggagaggcgctgccagctgacaaacaggaactgttaatcgattggctaataggaaacacgactggagatgctttaatacgtgctggggtgccggaaggttgggaagttggcgacaaaacaggcgcaggttcctatgggactcgaaatgatattgccattctttggccacctgaaaaagagcccattattttagccgtcctatcgagcaaagacgaaaaggatgccgaatatgatgatgaactgatcgcgaaagcgacagaggaagtgatcaatctcctcgcccaaacagaataggagcgtcccatttgggggaactctctcccctaatggaataccattttgaccagcaagaaaggctgggacccgtttcatctctccccattcttagccgaggctatgatgcagcaaccatgggaaaactatatgggattgcagaaggtacggcgttctacacaaacgcctcctcccactcttcacccattgagcggcaaaaaaattgcccagacaggcagtccatgatatgatttttctgtacgaacatgcctgtcacacaggcgacggcaagtttttgttgctaaaaccgataaaacgagcaaggataacgatccttcgctcgttttttgtacaaggtgattacaatgaatcaactgagaggccggttcgcgcccaccccgtcaggcgagctccatctcggcaacctttacgttgccttgctctcttggctgcaagtgcggcaaggaggcggacagttcattttacgtatggaagacatcgatcgtccacggtcaaggaacgagctcgttgggccgatgatggacgatttgcactggctcggcttggattgggatgaaggcccagatcaaggcggagaaaacggtccctattaccaatcgaagcggctgcacctttatgaagaagccctacacaacttgcaacagcaacagttgctataccattgttattgcagccgagcggagctgcaagcagtcgctagcgctccccacggcgttgcttcagaaggccaagcctatcctgggacatgcaaaaagctgaccgcggcggagcgagcggccaaagcggccaaaaagacgccgtcattgcgctttgccgtggacaaagggcccactgctgaaaaaatggacgtagaaatggagaagctgctacgtcgcggcggcgattttgtcgttcagcgtgcagacggcatcataagctatcaacttgctgttgtcgtcgacgacgcgttaatgggcattacggatgtcctccgtggccaagatttatacgactccacaccaagacagctattgctatatgccgcgctcggatataccgctccccgatttgtacatgtgccattgctttacgggccggatgggcggcggctggccaaacggcatcgtgatttatcattggcagcgatccgcgcaaatgggtgccggccagaggacatcgttggtctactggcagcgttgagcggtttaattgagcacccagaaccgctgacggcagcggaattaattccagagttccggctagaaaagctgacgacagagccgattttattggacacgcatttgctgcaactgctcaactagccgattgatttggctggacgcagccatcgcacgattgcatcatgtgggccagggcttagaacacttttcgttggtaaaccacatgggtaattgtccaagaaagaacatagactggcaaaataatgagtgccgctcctgaatataaagccgggactgataaatggacaataaagtcggtaatggctgaaaatttttcagctaaagacagtacaatagatgggcccattcctacgaaaaggaagaaactaatcagcacaacgatggaaataaagcccggtttaaatatataaaataaaggaaaagtaaacgagacaaacaataagaacaagccactgcccatggccatatccgccatcgtaaaaggtttattaaaaacaaacaacgccaaactagtaattacaatcgctaaacccatataaacaatcgcaccaatgtaacgggaggcgataatttctgtccgtgtataaggcaaggaatttaataagatgttggtttcagctttttcatcgtaagcatgcgtgttaaagggaataaagagactggcgacaagaaaaatcaaaactggatgagcatccataaaaataaaaaataaaataaagggaagatacacgattagttgccttttctgtaagataagatcacgtttaattaaattaaacatcgtgtgtaccctctttcaaatagtacataatatcctccaaagaggcttgttcaatcacaaccatgtcaccgaaaatatcgttcactacttcaatgttatccgttaatgcttcaaatccagtagatgcacgatgagtatgaacaaaggccctttctgtgtccctatccaaaagttcgtttcttcctttaacaagggcataactttcagcgatatcgtggaccgacttattaaataccagtttccctctccgtataaaagcgatataatcagcaattcgatccaaatcagtcgttatatgggtagaaaagaaaatcgttcgattgccgtcaatcatcaattcttgtaagagatccaacagttcccgcctaaaaatagggtctaagcctgctgttggctcatccataacgatcagttctgcatgatgggatagcgcgatcgccaatgaagccttcatttgcatccctttcgaaaatgtctttatcgctttattaaggggtaactcaaattggtccacatattgataaaacgatgtgtcatcccatcgtttgtaagctggcgccacaatgcgcttaatgtcttttaagttcagcccttcaaaaaaaacattcgcatcataaacgaatccaatccggtctttgatcgccttttcatgcgttttatagtcgtgcccaaacaccttaacttccccggcatcaggctttaataaattcatcattatttttaacactgtcgatttaccagctccattggcaccaatgaatcccgttacaaagccttgttttacttgtaaatcaatatctttaatggagaaatctttaaatgtcttcgttacattttttaactcaattacatgttccattcctttactcctcatataaaatcttcaataattcctgcagatcttcaagagacaacccaatttctctgctatttgcaataaccgtactcagctgctcctcaatcacccttaacttcttctccctcataacctccaaattttgctcggcaacaaaagagccttttccgacaatggaataaataaaaccggccttttctaactcctcataggcacgtttcgtcgttattacactaatttgtaagtcctttgcaagcttacgcatagaggggattgccgttccctctggcagctcacctgataaaatagccgatttaatctgattcgtaatttgttcataaattggctcctttgaacggttggaaataatgatttgcatgccaatccctcttctttattttgtgaactacccacacttatcacccttgtaggtcattaagtgggggcttcttgtgtaatccgccccttttggtagcggacgaaatggaccaagcgaaccctcttgttccaaaagtttatcgattcattaggcagtggctaataaacgaattccttcttttttgatattgattgctgaattgtaattttgctaatcaacccagcatttgacgatagaaaggataatgttttaccgatattccccatatcttcatataatgtatatatactatatgcccatcatatacaggcatgatccgccatgcaacctttattgcctaataaccgacgttgtatacagagataataaccccttttcaatcgattttatcgagagaaaaggggttccttattttctactaaccattgtggacaatcccgatggcttactttgctttcattccaacgttatagacagcgtgggcaaggatgggggtatgatcgaacctgtaacataaaacaacaaagcaaagaggagcccgtttataaatacgcctactaatgctaaagaaacgcctttatattggggcacatgaatcacccaaattaaaaacgtgctaaccaaaataacagcccaatctgccaatcgagcataaccaataaataacctgatcgccaactcatgcttcagcggaaaacggtgatggggttcagttcatcaaaacccattttccactaaccacttcattatgctttcttcccttgtctttatatcatcatgctgcggctcgtacttacccaattgtttttcggccacaacatggccatcaatcataaacaatactctttcagtttttgcagccacctttgcgtcatgtgttacaagaacgatcgttgtcccttgttgatttatgtctgcaagaatggacatcacttctgctgacgatttggaatccaatgcgccagtcggctcgtctccaaaaatgatgtctggatcattgatcaatgctctacaaatggcggctctttgcaattggccgcctgagccttgattgatggggcgattggcaagcatgtctattcccgtcatttccaacagtttttttgctttttggtgcaccgcctgtttattagcaccttttgatacaagagcaggaaacatcacattatcaatcagagacagattcttcagtaagttcatgtgctgaaaaataaatcctatgtgattcaagcggatttgtgccagttcctcttcagccagacctccgatttcaatgcctttaaatgtcacatttccagaagaaatgcggtccataccgcttagatgataaatcagcgtcgacttcccgcttcctgacggccccattatcgatacgaattcccctgcttcaatttctaagcttacattctttaagatgtagagcgactgattgtttccaagttctactgatttgtttatatttcttgcctctaataaattccccatttatattccgcctttgccaatagtcattttctctggacgctccaccattagacctttagactttcagcctggcagataaatctccttttacagctggcttacacgacacggatagcgttattgcaacggcgaccatcagcaataatggccatagcaaccaagtctgccaaaccacttgaaccagttcaatttttgcagcccccataaaggacatcgccaagcttactaggaactcccctatataattggacgctaaagccccaaatagggttcctaaaaccaataccatcaacgtggccgccatatattgatgacgaatttgtttcgaagtaagtcctatacttcgcataatggccatttgcgacatatccttggatactaacatccgtaagaacaaggcagtaatcaatacaatcataagaacagttataatcattccaccaatgacaataacccccatttgatcgatgatgttcccgagcgtttgttgtgtatagtccctgacatcagtgacttttgcaaatccatacgtagtctggtagttgttcattttttcctggatgtttacaccggcagctacattcatgctcacatgcatccaaagaacagcgtcgttatttatgccaagatccatatgtgcttttgcggttttcccgccattggtaatatcctgataaatgcccgttactgttaacgtcttttccttcccgccagcctttatgacgacttcatcgcccactttcttatttaatccgctagcggaagcattggcataagacagcgtgatttctccctctccttgcggggccctcccttctaaatagtttaatggaaatagggaaaaatcgccgatctcgatataaatatagtcccatgaaccctctgtatttttgacctggtatgcactggtgatgtaagctgcatgcttttcgatatccgaatcgttcactagctcttcgtgcaatcttgtaaaatccgctgtgatcgtgtctgtcattcgaaggtctattctcatatccgactttcctattcccatataggtagaaaactccggtgaattcatggtgttatatacatgtaaaggaagaatcgccataaacgtggatacgatataaattaacagcagtaacctgtatattttaaatcgtctccacacatctcggaatcccatgtaataattgaggctaaaaaaacggttgtgaagcaagggaaaacggtatttctgttttttacccggtgccgtcatattggagcgcaaagcttccactgcagagactttatcaattcgttttaatacgctcttgcagtacatcacaatgagaaaatagatcacgactggagcagcaaaagatagtacatatggtaaaattcctgccgagtccgaagagaggtatagcctcatatttctgttaaacagatggactacgaagaaggagaggagataacctgtcaggccagcaatgactgacatgattctgtatttagtcagatacaccttcctgatctcccttttggatatgcctattgctttcatgataccgatttctcttacgtcctcatccatcgtggccagaaacgtaagcctgatacatagaaaagcaatcacaatcatcagcatactgataaggatgatcaccaacgctacagctgcatctgagagcgcattaaatagcaaaaagacttccccttcgacagtcggcccgtttgctggaagcccagcttcgatataggcagtctgtatggcttgggaatcaccgttctctgtcagcttgaattcaatcaagtattcccgttccccagcctgcatcgtgtacatttcatcatagtctgcctgattgagaacaaaacgtttcgatgaagtaagggaagcgttcatctcataatctcttgcatagtcagaaatgacaaagtctttcgggtattctccgcttttcacggtaatcgtgtcgccgattttcaagtgatagtgctccatgaagtagatgggaacagcgactcccccttccatgacatcgagcttttcattattcaaatccaatataaaatcaaatttttcattctgtacaacaaatgaaatatcctgcaccgttccagccatcgtttgattgtcgccaaagtggatatggctgccatccaacgttagcagcaccattgtctcctgcatcgcgatatgctcacgctgtgcttcagtaaatcgatcaatgtcttcctgaacaaactcgccagaatgcatctgcgtaatatctgctgggactgcacgcttttgcagatccgccatcgagggaatcaaatgggcgatgttatggacagcactcgccgctaacataacggcgaacataataaatagaaaaacggcggctgtaatgattttattccttcgaaaatcatcccttaccatttttaagaacacaaaattccccctgactatggcattccttttcttgccattcacgtttttgagatgcccgtcctatctgtcccgactctatttggggtatccatgtctctaatgccccttgacctagagacaaacagtgccgtaatgataagccctagtccagcaagaataattaaaaatccgatccctctcgcttcacctgtcccaattattttgccaaccgtacttgcaagcacgccaccttctgcaaaggcagggttaaatacatggtctgcaagaaagccgccaatgacaaaagcaacaacaaatcctacttgtgatattaatgaaataagcccccatgctctcccttgtttatgattatcaattgattttctaatgagcacatcgatacttgcattcgcaaatggcagcgaggcaaagaataaaaaccctgaaagaaggatgaccggaatgcttgttgtggcaccaaacccggccattgtaaccccagcgacaataaagcttcctaccatgacattgacatagtttttcttaaggatgccgttgcctatgacaatgctggacaccaacattccgcaggcaatgatcgtaagtagaatgcctgttgttttttcatctgtaattgcgaggagcagcggtttggacagtacttggatcattcccatataaaacattaagaaagatacaaggacaattaatcgcaatactcctttcgattcaagaataatcaaccatccttcctttaaatcgttgaaaaaattcaatttttccttgacccgcggctttatcgcaagtgatttccttatcaaaaaaatagcaataaccgctattacgaaagtcagaatatcaatgataagcaccacttcaatcgtagaaaaggctagaatgaaccccgctaaaataggggaaatcaaaaactttgaagacgatgcaatgcccaccattccacttgctttggcatactcttcctctgttaggaggtcggtaatcgtagctttataggctggatttaacaatgccgaaaacaaagaactaaccccaatacaaacacagatttgccacacttgaatatgtccattgataataagtacgagcaacacaactagtgcaaatccagacacaatatcccctaacatcataagcagcctccgatcaaagcggtctgcaagaacccccgcagctggagctagtaaaatcatcggcaacagtgccgccatttccaccattgctacatccaccgctgattgtgtcattagccacacatatacgccaagagcaaatgcggtcaatcctgtaccaatattggatatcaattcacccacccacaggactaaaaatttgttcaatccattttctatttttggattattcatggttgcctccatccttgttggcaaacaactccaatacatacatgagacttccgcgctcagcaccgagcaaccgttctaggttgaatacaaacgcgcgtacgcgtgttacacgctcctcgtccgtcatctctaccatatcgtcatcgaaaacggtattaagatagattacaaccatttccatgcattcatatgggaacggcgtgttaaacaagcctaattcgatgccctcgcggatgatatccgccaatatttgcggcacgttggaaataatgactttttcaattttctggtgcatgagcgcgttttgtggtttatgaatatggtccttcatttcttggccgctttcaccacttacgtttaaagccatgacgacgccaataatacgctcactaacaggtatgcttttgtcggcagcgattacccgcgcctcgcttaaaatacgagtactatagcggtcaatcagcgcgtccataatcgcctcttttgacttgaaatgataatagagcgtccctcgtgcgattccgactttttcaagaatgtcttttgtacttgtaccttcaaagcccttctctccaaaaagctcatccgcggcgtcaagaatttcatttttgcgttcttctgcttcttttacaactctcatggctacatctcctctttatagaccgactgcctgtcggtaatagaataacatacaatttcgagttgtcaagatgtcgtactgcatccctccatgcctttcacatggaagcaaggacgtgtcagtacgacatcctatgttttcacattcggaaattttaacgacaacgtcaaacccgagccaggctctgacgtggcctccaactgaatcgctaaatcatcagccattttgctcactaaaaaaagccccatccctgttgcttgccttgtgtaagcccctcgccctccagtaaaacctttatcaaaaataaacggtaaatcttctcccgaaacaccaggtccattatcacgaatatgcaaaatcgtttggtctctgttttcgtcatacatggtttcaaatgtgatcaatggatcatcctgatttagtgtaacgtgttttgtactattggcaataacctgttctataataaacgctagacctttgcggtcggagagaatttccatctcttcgcctttgaactggatttgaaaaccagattcatcaagtagtgtttggtaatctacaattgtccgtttacaaaacgctaggataggaatcgactcaaacagataatctttatgggcagctccaagtctggcataatataaaattcgctcgacatctccacgaatttgatctctgacatgaagcatacgctgtcgaacgaggggagacatttcatcactgcggttatctaaaaccaatgtcatcaatgacagcggttttttcatttcatgaacccaaccttcaatgtagttttcataatcggcgagctcaagcacttgttgatttcgttcctcttggtgggaccttagaacgtttccaattctgcggataaatgaccaatgtgttttcggagatacacggcataacatttcttcgtttgcctcattcggttctaacaaaaaatcttcaaaggcagcttcgattcttctttcctttcttataatcagaaatacagataccgatatcatcgctaacgtaaaaacaaccattaagcttactaaaacgttaaacgtttcagggtaagctaaccaagcgaaaaaaataaataaaagattggttaacattaacataaaaaaccattgcttatgcgcatgaaaacacgcataaatgtgtttgatccgattcatcgtctatactccttcagtcgatacccttggccccttaccgtttcaatttggtcttctaagtttaatggccgcagcgtctttcgcaaacgcgtgagattaacttgaatggcgttttcgtctataaattggtcggttccccataaaagctcactcaacgctttttttgacacaatttcagggcgactctgtactaacgccaataaaatttttccttcattcgccgataaaacgagcgactcggatcccttatacaacgtataggtattgggatcaagcgaaaaatcgccgccatcgaccaagcctggctgtctcgcaaaccttcttaacaagttttgaatgcgggccaataagcgatcgcgattgcatggtttcgtcaaataatcatcggcacctaaatgaaagccatgtaactcatcttgtaacttgtctctcgacgtcaaaatcaatattgggccaatccctttcgattttaggcttttgcatagatcaaatccagattgccctggtaaattgatgtctaacaagactaagtcaggtgccaaagtggcaatttgatgggcaatgtcgtggaaaactgtaacggctacaacatcaaatccttcttttttcaaaatatccattaactcttctctcatccatacatcgtcttcaacgattgcaatcctcgccactttagcacctcctctgtacagatacttgttaatcgatgtttggcttccatcgtaatttatcgatctcatggtcagccgaacgggcaacagcgactccataaatcgccacagtggcgatcacaatacaggcaaaggcaaacgcgataggatacaggaggggatcgtcctcaaagcgaatgaccacaaatgaaatcattgcccttatcccaacagctgcacttacgcatgcgagggacatcggcaacataaaggcacacaacacctgtgtatgcatcgattttttcatttgatcacgtttggcgcctaacatcgacagggtgacatagcgccctccagtctgcttcatttgcgtcaaaaattgtaaagccaataccgtgcaagcaatgattaagaacaagaatcccatatacaagacagtataactcccagcaaccacatagaagagcctgcgcccgaagttttgcaaataactttcaaacgggaagcctgaagttgttaatacgtctctagcctccattagtggtttcattaaaccttgctgctcctgcaacttttgcgggattcggaaattccaataggacacatacgtttctttattgactaattgttcaaacatccggtcagtcacaataaaggctgaaaagatttccacggaacggtccgctaccaatcctctcataggaatcgatgggcgtataaacaagtcttgattatcaatactcagcaaacgttgcccctcttttgccgccttatcaagaatcgactcaagtacaggcatgcgttcaagattttccatagggacaaaatccgggttaaagtacaaggcgatttcatctgaatcaaggttcaggggttgttctcctattgctgttaaaagtccattataagacgattcaggaattaggtaaggtgtcgttgtatccatttctaacacccctaacaaattaagagcttcagggttctccgaactaatatcgtaactttgcatttctccagacaaaagtggctccttatagtggctaggcaaagccaagataagttgctcttttaatttagaccaatcaaccaatgacagtggcatcccatcttccgcgcgctctccctgatcgttgatttttcccatttccaacaggtttgagtcttcgacataagggcgcattttttccgaagccaaaaacggctccactttttgactgtctccatgaatcgtaaaatcatatactgaggaatctcgattatacaaactgtctaaactcaaaatcgttgaagcaccattggcgattaaaataatcgacaacgtgagcagaatcgatgtgaccgcaaccgcagttgaccggttggcaacattctcttgaaactgccttaatgtaaaggtgtgcagccctttcatcgatttacgcttggacaaacttgcccaaatgcctagtagttttccaaatccccttataaaaaggatcgttcctaagcttccaaaaaggagtgccgcaaacagaagcagtccgccaaagtctgcaaaccgatataagacgatccaataggcaacacctagtaagacagaacctagtcctacatggagtgcgttgccttttacatgacccatatccgttttcttatccatttgctcatacagtaattgatggacttcctgttgaaacaatcttccaccaagcatgaccaatgcaataaactggatcaataaaaaaccaagaatcgtaaaaataatcgcctctacggacaaactaaattgatggccgatgatcccctgtccaactaacttagaaacggtcaaactaatgatttctgctaaaaagccccctactaaaaggcctccagcaagtgccaaaatcgaagtcatcagcccctcagccaaaagctggacaattagacgctccttgcgcattcctaacataaggtaaagcccaaactctttacttcttcgatttaattggtaccgattggcaaataaaactaagaaaaacaataaaaataacgcaaacagatagacaatccgcatttcagctagcagcttatcaatcgcatcactctcaaactcccttaaaaatatgataacatcttgtttcccgagcgaaagaatgatataaaacgaagcgactgccgttacaagagtagcaaaataaatcgcattttccttgcggcttcgtttggcattacgaaaaaccagcctagagaacattggcgcttcctcccccaagctgagctaatacctgtaaaattcgttcataaaatcgttcttgtgactcatcctgttttcgacgcagttcatgaaaaatgacaccgtcttgaataaataaaattcttgagcagaaacttgctgcattcgggtcatggctaaccattaaaatcgttcttccactactctggttaatcccttccaacttgttcattaacgtttttgccgagcgtgtgtccaaagcccctgtcggttcatcagcaagcacaatatcagggtcagaaatcaagcaacgggcagcggcgactctttgcttttgccctccagacatctgagcgggaaatttattaagaatgtcggttatttctaaaaaacctgctagctcatttattttcgcttgtgctttggcaaaatcaattccatgaatggacaatggcaataatatgttctcttgccccgttaaattatccagcagttcaaagtcctgaaacaaatagccaatacgactgccgcgatacgctgccaaatccttgctgtcaaaagcgctaatgttctgcccatttaaaaggacgcgccccgatgtcggtttgataatggtcgcaatgcagtttaacaacgtcgtcttgccagagccactcggccccatgattcctaaaaattctccaggaagaatatcaaaccgaacaccgtttaaagctttcgttctattgtttttctttccgtagtgtttttgtaagtcttgcacctctaataatttcccttggctactcatgtataactctccctctttgattctcattttccggaatgatcatcgatcgatgaagctatacacattataaccagcctaaaatcagaaaaatacttacagatggtgtaagggacctagctttcattgcggtgccctgacttacaacgtatgggggcaggatcgatacacagaaaatcgagtcttgtaatttcagtggaaaaacattaacgccttgtccttcataaaaataaataaagcgttcggcattttgaccaaacactttacgaatgtggacagcgatattgatttcacttaatataaacccagtactttgattttccattagatttctagctaattttactcagaatcacactggctgctttggcagcaccgcctgcctcccgaaagctttttgccaatttctgtgcttcttttttataggtaggattcacaagcacttcagctactgctgccgctaaatgctttggcttattagagttaagtttaaatcctgcgcctagctctgcaacccgatcagcgaccattctttgttcgccatgctgtggaaataaaatcaatggaacgccaaaatagaggccctcacttgtgctattcattccacaatgggtaataaatacatctgcttcctgtaatacagagatctgctccaccacgttttttactgtgaagttttcaggtatacgaccaagagacgaaatatccgttttatcaccaacagacatcaccacatcataatccgcgtttgcaaatgcaacaaggcagttttcgtaaaaatcttgattttgattgagtaccgttccaagggagatatagattgtttttctccctcttataccatcctgtagtggctccgtttgccttatggatggtccgacaaacgtatagcgttctgaaaaagtatccgccagaggctgaaaatccttcgacgtgtacacaatggtgtccgtttcattatcattttgaattaaggacactacattctttactcgataaccgtgatcgtttaattgcttaatctttttgtttacccttcgcatgcctacaatcattctccagatttctatgaagctcctcttcatcaattttgctgtatgttgattaaaagcaaacgaagtagtcgaacaaatagagggtattcctagtttttcagcaaataatttcccccacatgcacatcgagtcgtacacaatacagtctggttgaatttcttttaattctttacaaaccttttgatccaaggccattgttgtctcggctgtcatttcaatcaatgctgcaaagtctttacctactttactatccagctctttttgtgaaacttgaggtaaaaaattatcacaagcaataaatatagcgccagcttcttttattttatgttgaaactctaaaaaagaataataccaaacttggtgccctttatttactaattcgcttaccaccggaatagtggggttcgtgtggccatgtgctggtatcgagaaaaaaacgattttactcattccgtttcacccttcagttcagcctttcgaatcatgtcggcaaattccagaaagccttcacttttcaaaatagcgattccctttgtcgtatcttctcccaagacaaccagtttgtctcctgcatgaatttgatacatttctcgtgcctgtttcggaatcaccatttgtccccgttctcccaccttcacaacaccaaaaaactgctttcccttaggacgaagctggtttgcttcttcttcactcatatctcgggataattgatcaatcgttacttgaaatatatcactaagcatcttgcatttaaaaatatctggaaaagcttcttcgctttcccactttgctacagtctgtcgtgagacatttaccttttcagccaattgttcctgactcagtttatgctttttacgtaaaacacgtatattgataccaatcatttcttccgtccccttctatctccaatctacagacgatttaacgtaaagtctatcaactttatataacagttgttgttaaaaattgtggcatatacgtagccatgttcatactcaagctataatggaactaggcgacaagaagcaatgaacaaagactgcaaggtagacactagtctctacagcttgaaaaagagagtttatagcattggcatagtcaaccactccgtgatgtaaccctctattatttgttgtttatcccaattgtcattaaaagcaggaaagataaacgtttgataaatcgttagataataaacaggagcaatgaccttcagccaattatattcctcaatgagatggggcttagaatcaaagccactccatttttccaaataatcatttaacaatgactgagcaacttcttctgaaaaaaactgttccacttcttttaggatgaccattatactcagaaacgggtgtgataacgtacaatcagaccagtcataaataaccggttgaccgttttgcaccattatatttccaccaaaaaagtcaccatgctctaaggcgagtggaatattcgatttttctatcttgtcgcatatatttatgatggttgggatactcgtgttcaacttttgataggtctcactcgaaatatgatggctctcatataaatcatcgaatgaacactttacatacgatttaattacctttgctacaggcctaactggacaatttcgttttttcaattcgtcaatatgtcgagtagattgcttttgcataactgctaactgttcaatcgcttgtctccagtaagcgatttttccggtctggccaagtaaagaaccttgtatttctcgcatgatataccagtttttgttcggttcgacttgtacaatttcaggtacgtacaaaggataatgttgaaataagtaatcgctcaataaaggttcatgattaaatacatccggtactgctttaaaatagtagttctgtgtatctgaaatgattcgaaacaaagccgacctttcccagcttctaatttgtgcaaatgttaaagaactgtttgacaaaacattggctgcccatctctccatttggtttctccatcctacatgaaaccatggaatgccagctgacctttgagtgtctatccaacttttcagtatcgtttggtcatcactattcaattttttaaaatcactaggttgtgataaagttagccatacgtgattagcaaattggacgctttcttcttccagaatctctacttcatatattcgtatattctcgagttgacgacagcaccttagtacagtcgttttcagctgaaaatgctcttttacaaattcatttatatgtcctactattgccacatgagccaattcaggttggtaagaaggtagggagaattcatttttgtcataagtaagcattaatttattcttaagtttcgaatatacaataagcttatatacccaatggctacccataactctcaccttttcacatgagtcatcgctctaaattatgccattctatgctttatgcctagttagcgaaaacgcgtcccgattaaaaggaaggggggctgggctgtagaaactgaaacatagagatggggaacctctcctcaattggatgttatgcgaatcaaacttcataagttctccatagaggattcctgtataatcacattaacacattcagcaagcctattgtattacaggaattccatgatatcctaaaaaggaatgcttaactactaacgttatcttctttttctagacagagatacaattctatcttagcaacaatgtggacgagagcttctgtccttacaaagtcaggtggtgcttacgatgttacaacgaacacttggacttaattgcattaatacgaatgggaaaggagctaactaaatgccttggaatacaatgatgttgtttggtacgttcatagcggttcctttaattatggtcatcattgttttaactatttataaaggagctaagaaaaaggaatcgaattaacgaagtaacgaatagaagcggctatatgctgcttctattttttcggcaatgtgttgttcatagtacatagcatttgtagagaagtagtattcctatttcgtatttatatggttgggatactcacgttcaacttttagataggtctcccttgctgttgcccgaggattttttacccataatcatcaagttattggaaatatatccctattccccggcagtatgttgtccaatcacatctgaaaggaacgtataaatatttggagggtattcagcaatacgatgaacgacatacaaataccactcgctaccatatgttacatacactttagcctgaatgccatcctcttttaaagatcttaataagtcaggtcgtacaccatccaacatctctacttcaacatttggcctgtaaagaagccctttcgcttttaattccgtcaatagattttcatcatgtgttgcaatagataatggttgattccgctctacacacatagatacaaattctatataccgtttatttaattcttccgatcttggaatatagatgccttcaggctcttgataagcgccctttactaaacggattctacctggagtcttcaatagatcgtttaggtccatcgatgaacgttccaaatgaacttgtaaggttattccaacacttgagaatgactttgctatccgtttgtatagtgataaaatggtatctgttttttgcgattcttccatacttatcattagttgaatattatgttgatgtgctacttttgctaattcttctaaattcgtaaatgccactgagtcagaaatcatcattccaatatgggaaagatcaaatgacacggtagctttcatttgcttatgcccgaggtctttgattagttctatgaattcatttttggcatccatgcattcttcttcagaagttgtattttcgccaataaattctagtgaaacctggtatcctttgttatatagctttataacacgttctatcccttccctgcgtgtctccccagccacaaatcggttcgcacctttcattaaaatcgggaaaagctctttggaattttgaatatatgctttgagttcatgatttctagcaatcgattttaaagctttagaaaagcgagcttcttcattaatcataagatcatcacatccacatttgatttagaatgaaaacgtccatacggaagctatttacgattctggataaaaatatccctgtattgcccaggtgttaatccaataaaatccataaaaaacttactaaagtgactttggtctacaaaacctgtctcgattgctgcatcaagtggttttaaacccttttccaaccgtttctttgcttcactaatacgtacggtttgtaagtaacgatacggggtaatccctcgaattcgcgtaaatgagcgtaacaaagaatatttgttcatgttcgctatttttgctaaatggtctaacgtaatttgttctgcataatggacttctaggtaacgacagacctgttcaatttcttgcttaatcgctatcgattcagtatctgtgttcgcttcggtatattcttcaataagttgctgaatcaagaaataaaacgtttcttctttctccaaatctataacttcatccataatcatctggtgaagatgatgcaataattgagcttgtccactccgataagcaaccggagaagaaaaggaaggaagataatcttgccctgtaatctcttttgtgacttttcgcatgatttcaggcttaatattcaaacagcgataatcaagtgtttggttgtcaacggattcacaggcatgattgtccagagggttaaaaaagataacatcacctgtacctattagatagtcgctgttcttacaagataaccgtctttgtccactctctatatagccaattacataatattcatggaagtggttcggaaacttttgcatgattccttcaaaccgataggcttctatttgtaaatcatgatcaaaacgtaccgttctttcttctcgtcccaccgaacaacctccttttcatttctaatactgagtgtagcacatttgggtaaagcgctcttgtaagatattgacttaaaaacatctcctttgtacatgtctagggatcggaaaaattcgattacaattagaaaacaacggttctttgttcgcctacaaaaaacacccctttggctaagacaaccaaaggggtgaaccttcatgacttttttaaaagccggatttctcattcaggataactacaaccttactccaccgtcacgctcttcgctaagttccgcggtttgtcaacgtcacagcctctgtgcagcgcggcatagtaggcaatcagctgtgtcggaatgaccgaaacaagtggcgtcagcaattcgtgtacgcgcggcaagacgaccgcatcgccttcttggtccaaaccttccatcgaaatgatcgcagtggctgcgcctcggcttgcgacttcttgcacattgccgcgaatgcttaagttgacatgctcttgcgtagcgagggcaatgacaggcgttccgtcttcaataagcgcgatggtgccatgcttcagttcgccgccggcaaatccttctgcttgaatatacgaaatctcttttagcttcaatgcgccttcaagggccacgaagtaatcagctgtgcggcctataaaaaatgcattgcgtgttacggataagtaatcgcgggcaatttgttccatttcgtctttttggttgcagagcgactccattgcattggcagcaatggctagctcttgcagcaagtcaaaatcaagcgtttttcctgctgcgttggctacatcaacggcaagcaaggcgagaacagcaatttgtgctgtgtatgctttcgtagaagcaacagctatttctggccctgcaaacgtgtgcagcgtataatcggcttcacgggaaagcgtcgatcctggcacatttgtaatcgtaagcgtgcggtggccttgttttttgacattcacaagcacgccgcgggaatcagccgtttcgccgctttgtgaaataaagacaaagagtggtttttcagataagagcggcatattgtacaaaaattcactcgcaatatgcacttctgtcggtttgccggaaacacgttcgagcagctgttttccaactaggccagcatggtagcttgttcctgctgcaacaatgtaaatccggtcgctatctttcattgctgcgcggatgtcttcatcgaggcgcgtgctgccatcttcgtgttggtacttttggatgatgttgcgaatgacgaatggttgttcatcaatctcttttagcataaagtgggcgtatgtgcctttttcaatgtcgcttacatcaagctcggctgtgtaaggcttgcgctcttgcacatcaccggccaatgttttgatttcaatacgatcgcgtctgactatcacgagctcttcatccatgatttcaataaactgatcagtgacagtaagcatcgccattgcgtctgaggcaacgacattcgcattttcgccaacaccaactaaaagcgggctcttgttttttccgacaaaaatcgtgtctgggtcgtccttatcaagaagagcaatcgcataagagcccttcataagcgagagcgctttgctgacagcttcttccgttgtaagtccttccccagccaattgttcaataaactgaacaattacctccgtgtccgtatcgctttttagctgtacatcggctaaataatcgcgcttaatttgctcgtagttttcaatgacaccattgtgtacgagcgtataccgttctgtggcgctttgatgagggtgtgcgtttaattggcttgggacgccatgagtcgcccagcgcgtatgcccgattccgactgttgagtggacattttcatcaacagccttgcgcaatgtggcgattcggcccttttccttaaacacctcggtatcgctttctgtccggactgcaatgccagcggagtcatagccgcggtattccagtttttccagaccacttagcaagatttcctttgcatcctcatttccgatgtacccaacaattccacacatatttttcgtatcctcccgtagtgggagcatcgacctgcaggggcagacgtgcccccactctttgaatttgttgcgtgctgcttttgtttttgtgcaacaggtcaccccattgttttgacaaaagcttgcggctgtcacacgcagccggagggaacccgccgaaagttcgattagccctctcctcgtcaactggcgtcatgccagtcctggcgctttggtgtatgaaattcatacaagactcataataaaggaatggagaattgccgtcaatcgatttcataggttctccacaattttaaaatatgcacctgtttcattcgggggaacggtttgttatcgaaaagggcaaaacagcgcttgttctagcgggaatttggctacataaaaaaggcattgcctcatgcggcaatgccttttttatcaagctccaagctgttcttttacgacatcaacaatttggtttgcgtactgttggcacaactcgtcggttttggcttcgaccatcacacgcacaagtggttcggtgccagacgggcgtacaaggatccgtccctctccagccattgcctcttccacacgtttgatttcttgttggacgagggcattgtttttaactgcatctttatccgtaacgcggacgttgattaagcattgcggaaatgttttcatgcctgccgccagttcggacaaaggcttccctgtttgtttcataatgtttaatagctgcacgcctgtaagcaagccatcgcctgtcgtgttgtagtcaaggaaaataatgtggccagactgttcgccgccaaggttgtaatttcctttacgcatttcctccatcacataacggtcgcctacagccgtttgcttcgtctcgatctgtttctcctcgagtgctttgtaaaaaccgagattgctcattacagtagtgacaatcgtattgttgttcaggcgcccttgttctttcaagtaggaagcgataatatacataatcttgtcgccgtccacaatttcgcccttttcatcgactgcgatcaaacgatcggcatcgccgtcaaacgccaggccgacatctgcctgtttttccacaactagctttgccagctcttcaggatgggtcgagccgcagcatgcattaatattggttccgtttggcgaagagcccatcgacgatatatcagcatcaagatcagccagtacgtgcgtagctaacgatgaggcagcaccgttggcacagtcaatggcgacgtggattccttcaaaaccgccttcaaccgtttgttttaaaaactgcatgtatttctgagagccctcaaaatagtcatttaactggccgacatcgccaccaatcggacgaggcatcgtatcttcgccatcaatgagtgcttctatttcctcttcttgtgaatcaagcagcttaaatccgtcagaaccgaaaaatttaatgccattgtcttcaaccggattatgagaagcagaaatcataattcccgcagttgcgcttagttgtttggtcaggaacgcaacgccaggggtggaaatgaccccaaggcgcataacttcggcgccaatggaaagcaaacctgccactaaggaagcctcaagcatctctccagaaatacgcgtatcccggccaatcaacaccttaggttgcgctgcctcttttgttagcacataaccgccagcgcgccctaacttaaacgcgagttcaggcgtaagctctgaattggctacccccctgacgccatctgtcccaaaatatttacccatgattgatcgctccttctttatgcgttctcattgctttcactcttcgaattgcaacatcgcctcgtcgtctagttcgaagcggatatgcggcggtccacttaccgatataggaagcgactgttctcctttataggaaccactcgcatccacctgcaattgtatatcgttcatgctcaaacgatctagcctggctttagtcccaaatgctgttactgggactgtcgatggctggtctgctgcgaaacggacagtgccctctgcaccgacaatttcaatcggcacgtcggaaaacgcttgcctttcttcctttccgacactaaagtggacacggacttctttcggttcaattcgttcggcatccgttggtgttttcagttttgccgttacctcgccgttttcttcaactttgcttaagtcaactggctcgctctctacgaactcaatatcttccaggacatccgtcggcccataaacggttacttcatttggttcaatcgtcacttcatcaatgctaattccgtctggcaactcattctcctttaccattttcactggcacaagtttattcgggctcgtgattggcactgtcaccgaaacgaaattagggtttgattcaatctccagttcttgccctgactcatcgtaaaaatggacagggtagtcatcttcaaccgtttctttgaccccttcaagatctacaaacactttggcctcttcaatttggtcaatcgtgtctccatctgcggtcacttccacattcaccgggttggcgattggtgaaccggcagcaaactcgtctcctagttcactttcattctcaagctccacgcgtaccgggatcgagaccgtttgtttttcttttaaagtgatgcgcactacttgaggctgcgtcgttactgacaaatcgctcggaaaattgcgtgtgttgacagctagcacatgttccccttcagtcgtcacatcagtcgcgtccacaaacacttctgtcgaccggttgcttgtcaactggaatagcgaaatcgacacttgcgaaccttggagttgcacactcactgtttccggttggtcaactagttcaaaacgagtttcatcataaaacacttcaagcggttggtcttcgattgtataaggagcgttggtgacttcaggcaaaagagaaggtgtgccaacattatcttggttgaccataataaataacatcaatgcaatgaagaaagctagaatccgcacaaaccaaatgctattaaacagtttatccattttttctaccaccccactgccagcggttttcagaagaagtcgcgcgaagcaaattctgctcaagcatctccctcaactgttctgcgcttaagttacggtagagcgtgccgctttttgatattgatatgcctcccgtttcctcggagacaatcaatgtcaaacaatcggttacttcactgatcccgagagcggcccggtggcgcgtccctagctcttttgatatggtattgtcttcagacagaggcaaataacagcctgcggccaaaattttatcgttcttgatgacaacggcgccatcgtgcaacggtgtattggggataaaaatattaatcaacaactctgaagtaaggacagcctgcattggaatgcctgtctcagcgtaatcgtttaagccagtctccttttcaatcgacacgagcgcaccaatgcgtcgcttccccatataagaagtcgctttaacgagggcatcaatggtcgtttgcatcgaatcatttttaggagctgaacggcttgtgaacaggcggcttcttccgagttgttccaaccccctgcgcaattcaggctgaaagataataatgatcgccagcaatccaaacgtagcggtttgcttggtaatgaactccaatgtgcttaaccctagaaagttgctgacaaaccatatcataaaaatgacagcgatccctttgaccaactgtactgcccgagtgccgcgaataatcataatgagtttatacacaacatatgtaacaagcaaaatgtcgacaatttggccaatgtaagcaagccatggcaaattttcgaagtctatcgtaaacatgtatgcccctccatgtttaatcgtctagtcttacctttgacaagtccagcgcatcttaaacgaaacgcagtgccaaacgtaacaagtatacaccgatccaagcgaaatagaaagggagttcccgctttacgacaggaactccattatttttcatgcttcttctaattgtcggtggaatgtggatcgtcttccccggcatcgaaaacagcgacaacttcactaaaaaactctttcatattgtaccacgcccaagacagggctttgtcgacttcttcaatttccccagttacttgattgggcgaagcgtaaagcgtgtctttgttgaagcggctattaatgagaaggacattgccgcgcacttccccttcgagcacgagcgtgccatttcggacaaccaaatcaccatcaatcacttcgccttcaggcacaacgaccacgcctgcttctttatcaatcacaaacggtccattccctgatacggcaattccgtcggtggtatggctccatgcggaaaaaaaggcagctgacatcataatgaggaatatcgctgctgcaaccaagatgggatggcgttttgcttttagcttccattttgctgtttttttcgtcttaggcaatttggccataacgccggcagtaaacccttcaggtgcctctatatgagaagaactttggataaacgcaatggatttcttcagttcttgcaaatgctctctgcatgacgggcacgattgcaaatgagcataaagttcctctttctgctctttcgtcgcatctccgtctaaataaatgtgtatcaattcatcgtgagaatgacaggttttcatcttgtcacccctttacatttataagtgccgcatacgtttacgcagcgcttcacgcccccgatgaatccgcgttttaacggtggcaacaggcatatccataatctcgctaatttcttttaacgatagatcctctaaatacttaagcacaatggccgtgcgatatttaatgggaagctggttaatctctgattgtatccactcttgaagctccattttcacaacctggtcttcaggcagttcatctgttgcggcaagttgggattcataggtcacttcctccatcccttttaccgcatcttgcaaatgcatatcaggcttccgcttccgcaaacggtcaattgacacatttgtggtaatacggaacaaccaagtcgagaactttcgagtggtatcaaatttatctaaattggtataagcacgcaaaaacgcctcttgggcgatatcttgggcttcatggacgtggccgaccattctataggcaacttggtacactttgtctttgtagaggtctaccaattcggcgaaagcctgctcatccccttgtttgatatctgcaattaatcgattcgttaacgagtccatttcatcccctacctaaattaaacatacggaactcactgacagatggtttcgtgtaatctaatcataacacgaaaaaatatcttttttttaaaaaagaaggaattttgtcctaaaccgagtaatgtaatttagaaagggagggaaggatatggcaaatgcgcatgacattcacccactgtcgcgttcgattgaagacacacggacgcaacttaatgattcggctgctgcttatccgctcagctcaccgcacattgtaacaatcagccagaaactcgacgctctgctaaatgaatactccaatctttctgcaaaaaaaccgcccaaacgcgtataaatcgattttcaacataaaaagagcagcctgtacaggccgctcttttctattagtggagcctagcgggatcgaaccgctgacctcctgcgtgcaaagcaggcgctctcccagctgagctaaggccccgataaaaaacggcttttgccgtcacagctttcgccgtcttaaaagaagtgagccatgaaggactcgaaccttcgaccctctgattaaaagtcagatgctctaccaactgagctaatggctctaatggctgggctagctggattcgaaccagcgcgtcacggaatcaaaatccgttgccttaccgcttggctatagcccaacaaaagaaaaatggtggagggggacggattcgaaccgccgaacccggagggagcggatttacagtccgccgcgtttagccacttcgctacccctccacaatagaaagacaatatgaacatggtggaggatgacgggatcgaaccgccgaccctctgcttgtaaggcagatgctctcccagctgagctaatcctccattttagctgcagataagctgcaaatctcttcgtctaattcgtgattctctgtcagtcacgtacgtttgtacgatccttccttcgaacacttcttatcctcgacctttttgcttctctttgctaaacgtctgcagataagcggcgaatttcttcgtccaattcgtgtctctcagtcagtcacgtacgcttgtacgctccttccttcgaacacttcttgtcctcgaacttcttgcttctctttgtcaaacaatgatgttgaggagcctcgttttataatagaggcatatctatgaaaaatggtccggcagcgttctactctcgcaagggaaagcccctaactaccatcgacgctaaagagcttaacgaccgtgttcggcatgggaacgggtgtgacctctttgccattgccaccgaacttaaaaaggcaagtgaaaagcaaggagttgagaagccaacttcttgctttgccttctactcataaaatgacccgtacgggattcgaacccgtgttaccgccgtgaaagggcggtgtcttaaccgcttgaccaacgggcctcctgactgacaaataatatgataacaaacgtttttttagattgcaactgtttttttcaatttattattgctctattagaatagccgagaagggctcgttttattcgctgaggttttaccgtgaaagcccagttttgtcgccaaaattggattgacgcataaggtatattattcctaattgtaaaggtggtgtacacgcatgggttactatggcggaggctacgacggcggctatggctacggtccagctggcggcggttacggtggcggctgcggcggctatggctacggtggcggttttgcgctaattgttgtgcttttcatccttcttatcatcattggcgcagcttacgttaaataattgtgcaaccacaacgtttaaagagcaggctaaaggatgcctgttctttttccttcgttggttcctaatatttcgctgcaccaacacaaaacgatcgaattgcaaaagacacactgcccttcctgaaaaacataggcttgcgaccgttttttactagtgaacgcctgggcaaagcgtatgatttgtttgcctaaatacctatacatataaataggcagtcgacaaaaccaatgcgttgacagataatttaaacacatgtatattaaacatagttttttcatcggtttacagcatttttacaaaaggagacaacttatgccacacatcacgaagttagccatagctacgtctattgccactgtattggctttaggcgcatgcaccaatgatgcaagccagagtcccagtgaagaaaatcgctttattgaatacggcatagcaaccgacattcgtccacttgacccccatacacagaacattgtcatcaattggcgtgtcggtgccaatatatacgaccgcttaattgaacaagatgaaaacttggaattgcaaccgagtttggccacagactggaaaatgctcgatgagttaacgtgggaattgtctttaagagaagacgtcgtttttcatgatggaaatgtgtttgatgcagaggctgtaaaagcaaatttcgaacgcaatctagcggaggaaacagcgtctccgactgcatacttgtttcaagctgtcgaagaagtagaagtcattgatccagctaccgtccgctttcatttaaacgctccgtttgcttcattgccagcgcatttatcacaccacggagcttctatcattagtcctgaagtgatagccgaggacaacgaagcagttgccaacggagaagcaccagggtctgtcgtaagtgaaaagccaattggcacaggccctttccaatttgaatcttggacacctgacgaagagcttgtcctcatagcaaatgatgattattggggtggtgccccgcaagtagctggcgttcgtttcaccgtcattccagacgctgctacacgtttagccaatctacaatcaggcaattccgacgttattgatgccgtttcgccaagtagcatggccgaaatcgaagaaaactcagacataaatgtaatcgaagtggagtcaacctacgttaacttccttgcctttaacaccaatgaagccccgtttgatgacgtacgggtacgccaagcttttgccaaggcgattgataaaaatgaaatttttgagggcatcgtaaacggctacggctctatcgcaaacagcccgctttcgccgtttgattttggttttacggaaatagacggcctttcctttgacccggatgaagcgaaagctttgctcgcagaagcagggtatggagaaggcgatctcgatgttacattaactgtcagcacagaaggagatcaagttaacatcgctacgtacatccagcatgcgttagcggaaattggcgtcaatgtggaaattgagcaaatcgaatttgctacatttgtcgagtatacaggcgaaggcaaagcgcaaatgttccttttaggacgttctagcccaacaggcgatggttacaacggtttctttacgattttgcattccaataaacaaacgagcaaccaacttcgctatccttatgcaaaccaagatctcgaccaactcatcgatgcaacgttggcggctgaagatgaagcagaaagaagtgcttatttcaaagaagcccaacaattagttgcagaggaagtaccatttcatttcctttactacccttcaactttgactggggtaagcaatgaactagaaggcgtaaacgtaattccaacaggagtcgttttcctaaaggatgctgcttttacaaacgattaaaatcactcggatagctgagcatctctttgtttagctatcctttattattcgagtgtttgatatttcacgcttcgttattttcatatttttctgttatactaacatcgtcatgatgatagcctttacctagctcattacctttgaacaaagaaaggatctgtgcttatgaaactagtatgctttggcgatagcattactgctggccatgaagggttaaacgaaccaatgttatccgcatttcttaaaaagaaattgccaccaacggttgaaatcataaacgctggcgtttctggagacacaaccgttcaagctttagcacgaattgaaaccgatgtcattagccatcaacctgatcttgtaaccgtgttgtttggagctaatgacgtagccacccataagcgagtgaaacaagacgaatttgctcataatatcgacaaaatcgctagcctcatttcgccaaagaagaccattttgattacccccgctcctgtcgatgaatcacttgaacaaaacagaacaaacgaagcactcaaggcatacagcgattgcatcaaggaagtagcacaaaggcgcaactgtcatttcattgacttttttactaccttcttttcaaagccagattatcaatggcgcttaaaaggcacgagggatgacggcttgcattttggtgaaaaaggctacgacttgctttctgatttaattgcagaaaaaatcgcttcccttacgaaagcaggaagcgtttttaaacaatcgggcaactgaaacaaaaagggacccccttacttgtttaaataagggggtcatttctaccttatcctgttctatcacgagaagccattcaagcctcgacttgctccctttcgaatggccttccccaataaactctcttatttctcgccgctaagtttcacgagaattttagcctggcgtttatcgtttgttaacacttcaaacccagactctacaatattttctagctcaatccgatcggttataacgcctttcggatttaaggctccctctgccattaaatcaatagtcgtttggaatacttccggttcataagccaaagtggacgtaatcttaacgccactgcccgtaagatccatcggattgaattcaatcggtttggcaaatatggaaacaacgacgacgactccccgtgacttggctacttggatagattggttaaatgttgcatttacgccagccacttcaaagcttacatcgaccccatctggaacaaggctttttactttttcaatgggatcgacttcgccagaattaaatgtatgggtggcgccgacaagccgtgctttttccagcctttcttccgataaatcaaaaacgatgattttgctagcccctgcagccttagcagcaataatggtaaacaaaccaattggccccgccccaaagacggcaactgattgtccaaatttaaaatcggcttcttttaccgcttgcaccgccactgccatcggctcaacgagtgctccttcttccaacgttaagttatcaggcaatttatatacatttttctctgggagtactgcaaaatcagcaaatcctccatctgtagcaagaccagcaaacgagaaaccatcatagagatcaactgaagcaggcttatttccgtaggtaaagagtggattaatgacgacacgatcccccttctgaaaggatttaacctccgttcctacttcttcaatcacaccggcaaattcgtgccctaatgtaaggggtgattcgccgccagtaataggatcaggttctccttttgggataatcaccggaccgtgcaagtattcgtgaaggtcacttccgcaaataccagcccacgctacgcgcacttttacatcacgggcgcctagtttcgcaggttctctttcctctacacggatatctttctctttgtaccatacggctgctctcatcaagaacatctccttattatgctatggtgttttgtttacacctttatcatagcactgtaaaaggaaaaatggtcatatatacggaaatgtccactaaatctccttaatgtattaaaaaacctttcattggctttttctatatattccgcttacaaaaggattggttcccatttctaaacttcagcatttgctcggctccattaaaggaaatcttatttataaggattgattattccataacaaaaaacgtcctcaaacgcatcgattttataaatatgttcttttaacgttccctcatatttcattccgcacttttccatgactttcccagacgcaggattttttttgaaatagtgtccataaacacggtgataatgcttttctctaaaagcaaattcaataaccgctttggccgcctccgttccgtaccccttcccccaataaggttctccgatccagtaaccaatctcgccgtttttatgttctttatcgtttgtaatggcaatggcaccatacagctgcccgctctctttatccgttatagcaaattcatatgactgctctaattcaaagttttgctcatgatttgctatccatgaaagggcacaatcgattgaatagggatagggcaaatgtaatgtgctcttataaaggttataattattgcacagctcaacgacattctgtgcatcttcctttgtaaacaaacgcaaacgcaatctctctgtcgtgattgttctgtccccacgattatagaccacgtagtccatcctcctaaaatcattgtccttcatcttgagtcttcttggtactgaaatgaaagagtcatgctcgttgacactccatccttgccaaggaggctcagattgtttcacctctcttataatattaatcatcgagtaagtctttattttttttataagatcggtgtaaagaaaacatatttaataagaacatcaggacaaacgctatgactcctaggcctgccaaagttaagaaatctccaattgtttttgggagaccagttaccaagatggagagtagagaaaatataaaaccgaaagtgattgaactgcctactatctttcttctttcactttggaaatcagcgctagtagctacattagcaaattctgtaccactacccacataacctattagaacatatgtgatcgatacaacaaccggaataaataatgctattgaagcatccatattcaaagagaatatagtttgtgccaatataaacacaatacttataaaaatgcttattaccagaccctctgctaaaaaatttaaaagcttttgctttttatattcatcgctcggaagtaaatcttttatccatgacctcatctttaaacctcccaaaataattggtctaatgttttatttagtgccttggcgatagctatacatagtttaagagacggattatagcgatttttttcgatcaacccaatcgtttgtctagaaacatttactttatctgcaagttccccttgggttagtcctaaatcccttcttgcctgcttcactctgttctccaaaaaaacaccaaccttctttattacacgtttactgtaacatagacaatgcccaatgtaaaatatatattgcattttatagatttaattgtttacgactctcgatttttccgccttccttacatttcaaacgaataatcacgctctactttgcatacccgtacgacgaatcgactataccactcttttttgccacgttcttgagcgacttggtgggctgcatgtgctttccaagcggcgatatcctcgagtgttttccagtaagaaacggtaatgcccaaattggaatctcttgcactttcgatccctaaatagccttcttgtttacttgctaattcgaccatttttgctgccattacaccatatccattgtccccttccgttcgttctgacgcaaagacaaccgcataataaggcaatttatatgtatttgctaagtgactcatcttcaaccacactccttattcatcaacattcgggcgaaaattcttacaattattatacatttaaccggaaaaagccgcaaaaacctaacctcttcttctcatttgctctttttgcgaaaatgatttggtctttccgcatatcactgctgcttacgctatgcgagaagtctttatggcgcgtctttccacttttgcgaagggccaattgtaccgatcttcttaaacgtatcacaaatagatgtatcgaattatgatataactattgccttctatatcagatactgatatattgttattggatatatcgctgtttgatacaatctcattagagagaagaggtaatcgtttgaaaacaactgagccgttaacagattcaatgttttatattatggctgctttaacgaagccgcggcatggttacgctattatgaatttaattgaagaaacaacaactggcgcgatcacgataggcccggcttcgatgtacacgattataaagaagttattaaaacaagagtggatttacttgtatgacggatcggattcaagacgtaaaacatatttattgaccgaaagaggcaaagaagtgctagaggaagctgtgaaaattcgaaaaacagtcattcaattggcagaaaaaggattacaggaggctggagaatgagacaaacaaagtatatgatgtcaggtgggcgagctttttctgaggataaagacatggataaattacggcgattttctttaaaaggctggcatgtcagcggctttaagtttatgggatatacacttgaaaaagggcaaagcgcagattatatctatagtattgattatcgttcattaaatgagggggaagtagaggagtattttgactttttctcttctgctgggtggacccatattgcctcagaagaagaatgtcacttgtttcgagcatcacctggtacaaaaccgatttatagcgatcaagaaacagtggttgaaaaacatgaaaatgctggaaactctatgaaatggaccgtactcccaacacttttattaacagtgctcttatggtttggaacattcataagctcaggttttttacatacgacactggttgtaatagctaccattctcactataattgccattccaactgcttggactgtgcttgcaatttacaataacaaatggaaggcagaaggaagaaaaggtttagtgaatctaacgaagatgatcccgcctcttcttttcctagttgcgatgactacattaataattgccgtcggcactgacagctccgttcgccttttagcctatatagtaatcggggcaatttcatttccgactgctatttggatgattatgtcccttaaaactagattgggaggaaagagagcatagggaaatttcgtaacatatgtagggaagtcttggggaaaacattggcatccctactaaatgagcccatgcttatctaaaatagaaaaaaggctgtctcaaaaggtcgctttactatggccttttgagacaacaagggagccccgatccaaataaatgaatcaggatatctctgttaatagtgccaaaattgtcattaaatagggcagaaaaaaataaaatcgtgacaaaatcccggacagcttatcaaaatcgataagtggtttccattatccaaaacgtgttcatgttgcggtcaagtaaaggagtctctcgctctttctgagcgtatcttccattgtggtttgtggcagatcgagattggaacgctgctatcaatatcaaacgtgaaggattacaactgttcgtataatcataaatagagcatggaacaggctcgatagctaagtccatttcgtaccattaggtgcgcttcgcttagaagcctccacctctaagcgaagcgtaggtggcaggtagttcacataatgatggttgttgcgccatagcataaccttcctcctcgttttaatctataagcaatcatagattgtgacgtaatgtcgtacgcaatctttttttaatacaaaatatcctggactataaacaagtgtattgattgttaccttacgtaggtggttcaacggtgagaacattatgcttatcacattccatataaataaaaaaactccaagatcactcaaatgtaagagtttatttggagtctttgagcggctgcccaaatagagttaacattgttataatatacatacctttcttatggccagttactaaaaagcaacatagtaagtctacatatttgaatcgcaattagtaagatatagttggagggttattatgaaagaaattttagtaatagcaccgtttgatttaacagatgctcaaatcgttaaaatggaaaactctctaaaagaactcccttatcaattccgtttcatggaaacgttacttccttatgagaaaaacctcgacgccatatctccatcgaccagcgccattgtttcaagaggcgggttaggtgaatttctccgaagccatacctctataccattcattaaaattcccgttacccccaatgatctgctccgttccattacttctgtatacaataaaggctatcaacggattcaggtcatgttttttgcagggatatttaatgatctggattttattgaatgtgacttcggtccattacaaattaaaatagaaagttatcaagaccaagcttatgcaaaagaacacattaaacagttaagtaaaaggaaaacagtagatgccattatcggggaccggtttgctactgatgcaggtaatgaagcaactattccttcttttttagtgaaatcaggtgaagaagcacttattttcgctgttgaacaagcgattgaaacattaaacattcaattcgaagaagaagctaaaacaaaagaacttgattccattcttcaagttgtccctcaagcggttataaacgtcgatgcaaatgacaacattaaaatgttcaatgaacaagctaagtacattttcccagaattgaaggaagcgttgcctgaattaaagtataacgaaatctttaagagtgaagaattgcaagaccaacttaaagctcgaacgattcaaagaaacatcctgacacctattaacaatcaacaaatgctcgtaactaccacccctattttttctaacgatatgtacgttggtgcgattcaagtattcgagagactagcggactttcagaaacttgaaatgaaaattagaaaagaagtatacaaaaaaggacttacagcaaagcatacttttgcggatattgtttgtgagaataaggaaatgaagagattggttagtgaagctgccgccttttcacgctccgaaggttctgtcttgatctatggagagacaggtacaggtaaagaattatttgctcaaagcattcacaatgcaagcgatcgacatgcccaaccttttgtatcattaaactgtggggctttaaatgaaaacttacttgaaagtgaattatttggttatgaagatggcgcttttaccggtgcaataaaaggtggtcgcgcaggactatttgaaatggcccatgaagggacactattccttgatgaaatcaatgagatgccccgtagttttcagataaagcttctaagagtattgcaagaaaatgaagtccgtagagtaggagggacgaaaaacatccctatcaacgtacgtattatctgtgcaaccaatcaaccaatggacgagctaataagtcatggaacattcaaagaggatctttattaccgcatttctactttaacattggacttattgcctttacgaaacagaaaagaggacattatcccgctcgctactgtttttttaaataaagaaatggaaagagaaaaccgttttttaaaaatcaatgatgccaaaagcgcacttcggccattactctcgatgagatgggatgggaatgcacgggaactacaaaactttatgaaaagattggtcattacttatcaagaaagtgtgattacagcagacggagttcatttgctattaaacaaggcgaaaaaaaagagcggagaagtaaccattccggtttcaacctctttcaaagaaatggaaagtcatctttgggcacaactatacagccaatttaatggaacaaaagaggaattctgcaaccactacaaaattagccaaactactttatggcgaaaactgtcccattcaaaaatgaaatcatgatttcatttttgaaatgaataagtgacctgtattgtctgaaataaaacgtagaaagattcttttctacaaaaaatgaagttgagttgtctttgggatgactcaactttttttattggcacataaactgcataaaagcaaggaaaggaggtttgcactcgctccaatagtatccacgtaacctattgcaagtccgtttacccaagcaaagatagaatttttggcacagtcattgcatgaataaaaaagtgaggattcccccattaacttatatttttctaaggagaggatttgaaaatgaacattgtagatgttgtagaaagagcagtgccaattagcagtaatatcgccaatgcttttattgactttagtaaaatgaatgcctccattgtggcggtaaagacagatgttattcgaaacggtaaaccagtagtaggctacgggttcaattccaatggtcgttatgcgccgagcggcattttaagagagcgatttattcctcgtttattagaagcaaaatcagaagatatcttaaatgaatcagggaccaacttctcgcccgaaaagatttttgacattctaatggcaaacgaaaaaccaggagggcatggcgaaagaacagttgcggttggaacactagatatggctatttgggatgcagtagccaaaattgaggaagtgcccctttataaactattggctgatcaatatggagacggcacgattgacgagaaagtctttgtctacgccgctggcggttattacttcccaggtaaagggttgccggaacttcaagatgaaatgaaatcctatttagatatgggttactcaaaagtcaaaatgaaagttggcggtgtccctttaaaggaagacctaaaacggattgaggcagttattaatgtcgttggtacgggacaaaacctaatggttgacgtgaacggccggttcaatctagaagaagcgattgaatttggaaatgcgataaaggactatcatttattttggtatgaagaagcgggagatccgttagattaccaattgcaggaggaattatcgaaagtttacccacacgcaatggcgactggtgaaaatttgttctcccttcaagacgcgactaacttaatccgttacgcagggatgaatccaaagacggatttcctgcaatttgattgcgcacttagctacggactagtggaatacatgaagatattaaacatgttagaagaaaacggatggtcttctcgcaattgcattccacacggtggccaccaaatgtcattgaacattgccgcaggattaaaattgtatggcaacgaatcataccctggtattttccaaccatttggcggatttgctgatgggcatgcagtggaagacggcttcgttacattgccagatgcgcctggtattgggtttgaagcgaaagagcaattatatgacctattaaaaacactataaccagtatgtagatcaaagagatatatggcttatatatctctttgatctattttttaaacaggcaaagagagtgtttagttgaaaacggttaaataaatcaccaagttcggggttaatttctttgatattagtgcctccttattcaggcgacaaggtcgttaaaaatgcttaaaaacgaatggttttttaatggccacggtcttgaactgtcttctttaatgccgcacaatgtcataactaattaatttgtacttctccaagaacccaaccgatttgtataaatgaatggcggctagattgtctcctccaacacatatagtaatttccataatttcagtataagaaaagagatggtcggttgccactcttattagagttttacctatcccttgttttcttagtttcgttgatacagcaatatattcaatattggcttccatatgtttagggtttgcttcaatatatacatacccctttatatcatgttcattttccgtaacgaagaataaatggttaaagtcatttaatcgactaataatggtatgtgcatcaaaataggttgtgggaaagacttcattatgtagattgataaaagattgacggtaggcatcagagtacgtttcaacatcgctaggcgtgtgattaataaatcgatctctagttatgctcaaaaccaaatccgacccttgatctatgcctttattttgtaacacaaactcttttccaaagtggttatcctcattaaaaaagaaagaaaatgtctttatcataggaggtgttttcgaagcaatcgtttcccacaattcttgagccatgtcgatatcttccccctcaacaaacggcccccatacgtccgcacatcctctttttaagtccatatccaaaccgattgcacccacgatacgagagtgattataagcaactaaaaatgaatctttcacttccaaatcggaaaaatcattcattaaatgatcgtatatttcttccctatcttccccacaaaagccaatatgagaactgcttttattgttcattttttctaggaagatagcaaggtctcttatatggtctgggggtgttataagagttttcattgggatcaaccctttctaaacaaatgatgtttagctattcgtccgattaaacctaatacaaatagtaaagaatgtcaatagactgctttttattttttctgaatttatcataaagaaactgcccctgtgcgagtgcgtcccattaatcatttttgcatctaagcgtccaaacggacttgaaacgctggccccaccttactctcttgctctcgaaagaataagttagccattatcgttaagactactattgactattcccttaacgtcattgtttataatcattatatggagggtggcaatatgataaaaattggacagttagctaagaaaattggtatcagtaaaaaaacactttaccattacgaaaatgtaggcattttaaagccttctttaataaaagataatggttacaggtattatgatgaacaagccatttcacaattacaaagaattttgttattaaaatcaatcggatatacgttagaacaaataaagatcctttttgactctgaaagtgagacaggggaaaatcaaacatggattcattcactatcagagcaagttaaattaattgaagccgaaaaagagagattaagccgattacaatactatttaaatgcgactatacacgttattaaattaaaagggcatttggaaccacaggaaatgcttgacgttatagaagatttaaatagaagaactttggttaatggtattatccctgctcgttttgatgaagcattagaaattacaaaagaacaaaaggagatacttgaaaggctacctgttatcggtagtgacgatccgagactggaagaaatattgtctattttcaacgaagttcgtgacattttgcacattgatccgaaatcgaatgatgtccaacaaatagctcatactctttatataaaaacacttgaattgtttgaaggcgatgaagaattaatgaatttttattgggaactaataaacccttccagcgataatgaactagtacttggcatgaatactgaagtaacagcttatattgataaaatgttctaccactatgaaaacaacaaggccaaaaaagaagaacgaaaggagaaaaacgaatgaagaagactaagcgcctttattttttactaatctgtgtaagtacttctcttgcttcatgtggagtagttgagaataaagacaacagtagcccaaataatgaaaatgaggaattaatcatacaagttattatcgaaagtaacgcttcgtacgcctctgacttggaggtggaaattaatagtaggaatagccctcaaacagttaacgaactatcaattgaggtcccttattcaaaaacatttgtaatacccaccgatgcagcatttccaataagttcaaccaaagttaaagctacagtaggaaaagatggcgataggatatcctgtaaaattttatatgatgaaatagaagtagctactcacgacagcgaaggagaattagcaacagctgtttgtgagaataagtttatagataacatattgtcctatcagtaaaacactagaaaatggaacggtggtggaataaattaacgacctatcttatttaatatttttagctttaatcgattccctgagtttcgggactttgttaatcccgttgtggctattaataagttcaaaagaaataaaaattaaaagattttctatctatatagtcactgtagtgcttttttattttatcactggattagtacttgtaattagtgctgaagctttgctaaatctaggtgaaacattcttccaatcgactacgtttcagtatttccaacttattttaggtgtgggtttaatcattataagctatagaatggactcaaaaacaatagatagacgaacagagaaacaagagaaaacaaacccatctgtttggagagatcagcttttaagtgactccaatactgctaaacaatcttcaattatgctcataagtcttgcatttaccgcatgtctattagaggtggctaccatgctaccatatctattagcaataggaataatctcttctaatgattattcacttcaacaatctggatttatactgtttggttactgcataatcatgattctgcccgcactaattttattaatgggaagagtgtttgcccataacttgctaaaaaaaccccttattcatttagaaatatggttatcaaagaatgccagaaacacaacagcatggataattggcattgttggatttatcctagcagctaatgccatttatgagttagaactttatcatctcatggcttgcattctaaacgtctcttttgtaacctagcctccatttacattgaaaatgatctaaagctacagggcaagaaacttgaggataaaaaggagatagtattcaatgataaacaactatatgaaaaacgttaaatcgatttatcctagtatatccattgaaaacttttatcttaatgaaatgggacaaaataatgatgtattaattgtaaaccattctctagtttttagatttcccaaatataaaaatggaattattcaattaaaaagagagacagaaattctacaatacattaaagatatcatttccactcctattccaaatccaatatatcagtattttgaagaattagagcccggtaaggtcttcactggctatcatctaatcgatggtgtgcctttgtggggggaaagtttaagcggtataaagaatcatgaattggtgaaaagcttagctacacaacttgtttcttttcttgtagagctgcattccatttcggaagagaaactaagtcgagagttgaaactaaaggttaataaccctcgtgaagaaataaacaaactatatagtaagattcaaaaaaatttatttgcttttatgagaaaagaagcacaaaaagaaatatcacactcctttgagaagttcctaaatggggaagcattatcaaaattacatttatcccttatacacggagatttcgggtcatccaacattttgtggaacccagaatcaagtagaattacaggtataatagattttggtggttcttgcttaggagatcctgcgtatgattttgctgggatactttccagttatggtagacatttttttgatatgtgtattagtctatatcctaatgatagcgaattatcagaccgagctaatttttataaaagtacattcgctttacaagaagcattacacgggattgagaacgatgataaacaggcctttgaaagtgggattaaaggatttagataaattcctatttgtctaacccctctgattgaaaggatttgctctcacatacatttcgagttaaccccgtatagaggaaagactaaatttcctattccctttcctaattaaaatgatgagactactcaagccttttcgaatgccaatagcgttaggatataggagtattgatacggcttgtagcaaaaagatttagtcagaaaagattcagatataacaacaaaagtatggaatacggatcacgggtttgaaaactagagggaaaacgattgaaaaagcatacccgatttgaaaaggtatgcttctcaatttccattaaagtgctcattctttcttatcttcctgttgaagggatcctttactaagaatcagttcattaataaccttttcaataaacaattcctcttctttgttaaaagcactagggaacaaataaggattagactcaaataaagaactttcacctttttcgagttgttccagcgctacttcgtctaaaagtggtgcgactactggtttcaaaatagagatcatggcttcggcatgtgccagaacttcagggtcattcggtgcttttcctgcttgaatgaatcgtttcattacactagtccatacagtcatttctttatccaactcaagttcttgtgtatgtgagtgtagtttattatacacagaatcggactcatgttcagttatccagcgatttcgcacctctgcattttttaaagcatgaataaggacaagcaatgattcttcatctacaggatctgaacctgaaacaatcccttgaacacgagtaatgatgtgtatcactgtatcaatctgttttttcttttctagcagcatatttttctgctcgaccattgtctgtcctaaatcttgttccggacgctccaagtgttctgaaatttctccaagtgataaatccaaaaatttcagcactaatattttctgaagctgggcaatggatctgttgttataaactcgatgcccatgttccgtgtactcaaaaggtttcaagatccctgtttgatcgtagtgtcgcagtgttcgttcagtaatcccagtcagttttgcaaattccccaatggagtatttttttcccatcgtcaatattctcactccctttctgtttaaactctaacacttgacgttacgtcattagcaagtatttttttcttatggcattgtatagtaatgaggaacaatggacatgtcaatttatcaaggcaggacagtttgttcatactgcgaacttatatttcaatatttccatggcctttaccactatgatggggcaaaataactgtataggagggatcatacgtttgttctcagccttaatataaacggtaatgcagatacacttaggagcagcaagaagtcccagtattttagtacatacactggagctaatggaatggcaagaaaattaaatagcatgtttttacagaagttgagtttttgattactacaattgtcctttaaaattatttaggaaacaaacgcttgtggtttctcaggacgtcattcgtcgggataggtcataagttcacgctagagtagaggtcacataaaacccataacccataaaaagaaccaaagctacaaaggccttggctcttttaaccttcactaaataaggttgagaaggatcaaacctccaagagttacattcaccaagctctcaaaagtgatgaatgcttatcattttaggtttataaatataagtgaaattaagaacactcaactactttaaaggagtttccattaccgtacccattctctatttcatgcacaatgatattctgaaagccatttctttttaatgtatttttaaatgctttcatatcataaagtttgattggaaaatccatgatttccgatttgcgaatagaatggttttgaatggattgatatttcaattgagtttctaatatatcgttttgttcattataagtaacttttttaaattcaactattgtttcattagaaaaagatattctatttgtttcattccaatctaggatttctttaatttccccttctttctccatcaatgtcaggagaagtttccctttattggcaagaacgctctttaaattatgaagactcttattaactatgctatcaggcaaaagcgagaaagaaccaaaaggaattaggataaggtcatatagcttatcacttttaaattcttcaattccttttttaaaaacaaatggatctaaatgtaacttttctcctttttctttacatactttaagcatctcttccgatatatcaaagccttcaatattgatccccttttgtaaaaaaggtattaacaacctaccatttccacacatgggctctaaaactttcatttctttatttttaacaaaagataggtaaaaatcaagttctctctcttccgctacaggtttttccttttcgtacatcttcgtgcaaagttctccgtaataattactcatttatctctcctttcaaaactatacttttagcttgtgtgagtaaattataattttaagttcttactgacacaagtagtactatcatttgtatacccaatcctgctgtccaaactgcatgtttcataggggggtgattctatggccacggtatttccacaggcgactctttatcttactccactctgtttcaccaccaaactctaataatatcactactaccttaccaccaataaaaagaagctgcttagacagcctctttttattagtactattcttctccaagcttaaattctgcaatgactggaaaatggtcacttgggtactgttcaccattgcgataatcattaatcccaatggattcagcgaaaatgttctttgttagaacccaatcaattttattatcggttccaccacctgtgggatcattaaatccattgaatgtacctaactcttcgtttattttttcttcagcataattccacggatcttcaaacaatccttctcccgttaaaattccatgagaaacactatctggagtcgtgttgaaatcacccgttagtataatcggcaagttttcatcgtattcattgattttttctataatcagttcagcacttttttgccttgattcttccgattgatgatcaaaatgcgtattcacgaaataaaactgttcgccagttgcttcttcttcaaactttgcccatgtgaccattcgagggattgtatttccccaagaagtcgagccgactacatccggcgtatcggaaagccagtaatgacctgtatcagttggtttgaaacggtcacttttataataaattgccatgaattccccatcagttccaccttctcgaccaattccaatccattcgtaatcaggtaagtcttcatcaaggtgagtaacctgatcataaagagcttcttgcgtgcctaaaatatctggctcttccgtttctaagaaggactgaactgtaggacgcctctcactccaactatgaggcgaagggtcgtttcccccgctattgcgcaaattaaacgacattactttcattttatccaactcctcttggttttccgaggcatgtacttgcttatcagtacctaacagataattaactgaggtcactacagcaagcgcaacccctactttcaaaactttcctcacagtaaaaacctccaatttgtttaagttgtctaaacaagaaagaacttcttttatttctcctatctaaacccttctatataaatacgttgtttcctgtcaccaaatctttacttaacaaactcaattttttcttaacaatgaaaggtaggcgttgcttattgtcctttcgtccggccttataatttcgagaaatgcgacggtaagatacttctaagctagcggcaagcttctttcattaaattgctcattacttggaaagtcataattgattccccatgacatcatcacttctttttcattaagcttttcacaattggtatttgattcctttttagatgtaagacccctagaccttctcgccaagacggaaaatcatgatgctgagtttttagatttgcccattcttaaaagctccgctgcttcttgttgcagctggcattgaatcaggcacagaacaataaaaggtttgcaaacaaatggcaaacctctttttgagcaaaaaaataagcctctccattagcggagaaacctttaaagtacttataagaaagcttccaagcggacttgaaccgctgacccccaccttaccatggtggtgctctaccgactgagctatggaagcacaaaaatggctccacaggcaggattcgaacctgcgaccgatcggttaacagccgatagctctaccactgagctactgtggaacgaaatatatatatagaaaaagcccggcaacgtcctactctcgcgggaggaagcctccaactaccatcggcgcaaaagagcttaacggccgtgttcggcatgggaacgggtgtgacctctttgccattgtcaccggactctacttcagataagcttcggatttcttcgtccagttcgtgtctctcagtcggtcacgtacgtttgggtacgctcccttcttcgagcactcctgtcctcgaactcctcgcttctcttcgtgttcttttttgacttcagataagcagcgaatctcttcgtctagttcgtgattcttcttcagtcacgtacgcttgtacgctccttcagtcgaacacttccgatcctcgaccttcttgcttctctttgtcaatcgctttgcttcagatgcggcgaatcgcttcgtctgcactgaagggtatggaaagaatcgtgattctttcaaaactaaatccgaaatagactcaattgtcaagaatgtgtataggataagtcctcgaccgattagtatcagtccgctccacgtgtcaccacgcttccacttctgacctatcaacctcatcatctctaaggggtcttactggcttacgccatgggaaatctcatcttgaggggggcttcatgcttagatgctttcagcatttatcccgtccatacgtagctacccagcgatgctcctggcggaacaactggtacaccagcggtatgtccatcccggtcctctcgtactaaggacagctcctctcaaatttcctacgcccgcgacggannnnnnnnnnnnnnnnnnnnnnnnnnnnnnnnnnnnnnnnnnnnnnnnnnnnnnnnnnnnnnnnnnnnnnnnnnnnnnnnnnnnnnnnnnnnnnnnnnnngtatgcattgaattcttgacgtctcgttcaaacagttatacaaccgatgaacaaagatcaatttgagttatttctggatttagttttcaaagaacctgagagagtaagtcctctcaaaactgaacaaggctactgatttcaattacatcatgtaacacttctcagtttatgcttcgtgctgccttgcgacgagtaaccgcaggagcaannnnnnnnnnnnnnnnnnnnnnnnnnnnnnnnnnnnnnnnnnnnnnnnnnnnnnnnnnnnnnnnnnnnnnnnnnnnnnnnnnnnnnnnnnnnnnnnnnnnagttttcaaagaacctgagagagtaagtcctctcaaaactgaacaaggctactgatttcaattacatcatgtaacacttctcagtttatgcttcgtgctgccttgcgacgagtaaccgcaggagcaatagcatttaatcgagagttttgagtgatcaccctctcaggtcggctacgcatcgttgccttggtaagccgttaccttaccaactagctaatgcgccgcgggcccatcccctagtgatagccgaagccatctttcaccctctctccaggtggaaaaagggattatccggtattagctccggtttcccggagttatcccagtctaaggggcaggttgcccacgtgttactcacccgtccgccgctaacgtccgggagcaagctcccttctgtccgctcgacttgcatgtattaggcacgccgccagcgttcgtcctgagccaggatcaaactctccgttaaaaagtttgacttgctcattgcacaaccgaagttgtggctcactatgattgacgagataccttgtatctcttttacgcttggcttttgttcagttttcaaaggactcggttgccgccgttctctcttggcgactcttaataatttacactacatccaaccatttgtcaacggtttttaaaaacttttttatacaaccgcccaaaagaatgaagacggtacataaaaatatacacctagtatgccttttcgtcaacgcctgtatttaagactttttattggtttgagtacggaatgaagagagggcatagcgaacatggtcctttggaggagcgacacgtttatataaatgaaaaagaatgctgtatttttcaatcatgacgtttttgacaacaccatcaaggcgctcatccgcaagatcaatcagcagggcttctagctcgcgctttactaagtattccatttcttttacttctttatcagacaacatcattcctaacatcgatctcaccgctttcaggggttcctagttggacagtcttttcgttttgctgcttttttattcatatcttccgcggacaaacatatcttgtctttgagaacaattgaaggagcggtgtacatgaaaggaatttgggtgtttaatttaaaaaaatggaagccactgctgtttatttgcatcgcttctctattcgttgctagctggctgtttatccaacgtgaccatatttccgtctttacaactccagatggtccgcaagctttttaccgggccgaaaacgctgaccataaaattgcgctgacgtttaacataagctggggagaacaaaatgtacggccaattgtgaacattttaaaggagaatgacgtggagcatgcgacattttttgtttcggcttcgtgggcggaaacatacccagaattagtcaaagaaattgcagattctggcttccacattggcagccacgggtatcgttataaaaattataccgctctggatgatgagcaagtcattaaagatatgagaagaagcaaacaagtgttgcaagaactaacaggagaaacaccgacactccttcgccctccaaatggcgcatttaccacgcgtacacttgcattagctgaacagcaaggcttcgatattgtccattggagcgtgaattcttacgattacaaaaatcctggaaccgcgcaaatcattgacaatgttttaaatgcgactcattctggcgatgttttaatgttccatgcttcagacactgttaagcaaaccggagcggctctgccaactattttgaaagagttggaaaaacgcgattatgaacttgctactatagaagaacttatgagcagcgccgacgcgacgagcaacgaagtaaattaaaaaacgcctatataggcgttttttacggtttagcgattagccggtgcagcatcaacagctgccatgtattcgccacaagcaaaggcgttatgtataacactagccacctgtcgtcatcggccactagagctggcacccactcgattgtcgtaatgacaaacataaagaaaagcgcggggacaaatgcgcctttatttgtttcttttgctttaatccgtgccacaataaacgcataaataaatagcaatgtcgggatgaccaaatacccccaaaaggagtgctcttttccaaatgcaatatatcggaaatagacaaggtcaaaaaagacaaacacgattaatacccactgtatccgattccataacgtatgcgatttcgataaccctaaaccaaatcggtgtaaaaacaaataagcaaaaaaccccatttgggcgaccaagctaaaagcggcgctaatgccaagcatatagataatgcctacgattaggttgccaatgccatccccaagatatacctctaaattgataaaaaaaccgacgatcccgccgctaacgcttccaaaaagcagcgtcgaccaaaaaaggaaaacaacttttttgctgttcacaagcctatcccccagttcgttatgcctcgctatcattgtagcaacccttttcatgaaacgccagcgcgttatgcatattttgtcgcaggcaacaaacactaatgccatcatgataatgcagaaaggaatcattcatccatgagcaaaaagaattggaaagttttgttggcattgccgttgctcggtctgcttgtattggctgggtgcgcccagacagaggcgcagcagaacgccgattatgagggcaccaaaaaaatggtcattgatttgttaaaaacggatgagggcaaaaaagcgttccatgaattgattgccgaggaagatatgcgggaagaacttgtcatggatagtgactttgtcaaaaaaaccatccaagatacgttaacatctgaagaaggcaaaaccttttggcaagaagtcatgaaggaccctgagtttgccaaaacatttgcagagagcatgcagtcggaaaatgaaaagattttaaagtcattaatgaaagaccctgaataccagcaaatgatgatggacatcttaaaagacccacaaatgggcgagcaagcgctggaactaatgaagtcgaaagagtaccgtgaacaaattatggggattatgaacgaagcgctagaaagcccttatttcgcctcaaaaatgactgatttaatgagcaaagcaatggaaaaacaaacaaaaggacaagatcagaataaagagggttcgtaatcatatcacggtttcatacaaaaaagccaaaaagtcactatctgcgaccttttggcctttttcgtttcaaataaatgagcaaaaaaattttagtgtacgattcgacagccccttccattcaatcaacacgattcagatattttctttttggctgaatttccgggctcactctccctaaataacaaatgtcacacctcccacatgagctactccgatttccatttattctcactgtgtttcggaaataatagagaggtcccccaagtgattaatgatatcagttcctttatgaatctataatggaaaaggagaaaggctcctccacgaagcgaacaaacacccattcaacttataatttccttttcagcctaagtcacgggtagggctggcctaaaaagttaagcgactttttggagagagggcggtgttacacccactgcgtgttttctcataaaaagtacaatatgcactaaaagttatagtttcgcccatgttcagtatattttttcaacaaaaaaagactgacgaaaaagcaaacaaaaccttcttcgccagcctgacaaactaacatttcattcaaaataattagggatgagctgcttcaacaacttcataaataagctgttcgttatcgaactctgttccattactattaaatcctggtccaactgctgctgctgctaaataaaatgtaagtccagctgcatgactatatacaactaccaagctaacagctactgcaaggtaagcaactatagcattaggttgagctgtatctggagagtctaacatttcaccatgaacctctttaaataaacttaaaaacatgttcgcaccttcatctaataggttcttggtttttacataatctttattataaaccacctcttctaatgtatcaaaataagctgggtctacttgtctcatttgagcaataatagggttagtaatcgcaatcacttcttctgaattattatgctcatattgttctttcacccaaagatgtttaaggttttcagcaaatgccccttgtcctagaacagcaccaagaaaaatctcttcacccgagaattttgtgatgtcattcaccccagctatcgattgagcttggacaaatgaaaaactaccaatcaagatggtaaaaatcattaaaacagacaagaactttttcacctataatcctccttacggtatattaaacagcaccttcgcctactaacccacctcctttgatgaagtatcctttatattgctagtgtgctgtttttgaaaagaacgtttaagatttgggaatttgaatggttgctctaaaggccttaaatacaagattaagatcccaatcatcgctaatgaaaaagaaataagaccgagcataatcgcgaaaacttcatgcatgattagtgctagaaagaagaaataatttcgatgcttttttggcgagaacaatgcggccactaatacaatctgtaggattattgtcccccaagtaggaattacaataagagctgacgttaacacatcttcaaacatttgaaacaacatcgggtttaaacctaacatcgcatcttgcatgtaataccaaacagctgtcccattttgccaatcttcttctcctaattttgctaccgtagagtgaaaataaagtatcgctacctgtactcttattgtcactaacgttactagtgcaactatctttttggcgagattttcagaatgaaagtgtgttgaagcctctttatgcaaccagtgccattttctcgaatcggataatgttaatggaagcaatagtaaagtaaaaacagcagcaacactgtctcccccatcgatggtcattgccgaagatagaaaactataggatatgtaccaatggataatacctgtaacttgtggacgccacccagaaacaacgataagtaaaagaacgatgcaaacatatcgtacgaggtttaagtatacgtattcgttaggaactaatgtaaaaatactaatgcctaagagatcttctcttggaaatatgtcagaatcagaagatggtaaaaacaacgttttcgcatcattaaaacaaagggtaagagcagtagataatgcgatcaaacttcgcgccagtccatacacattcgtccatggttgtgattggtaggcccaggaaattacttttttttctaacctttcgaacattttatctccaccttagcaatttcagatggcatatttatggcgtctttcgattttccccaagaccatggaataggatctgtatacgtaatcccccatgttccacagattctaggatgtctactcttattagttaccaccattactacgtcaacttcttgaaagcactcttcactttttctgtcgcaggaatagtaatcttctggtttaagatttgaaataatggccccaagttcaatcccttgactacggccctctcgatttaaaccaaaaaaatgccttattttattgtttggccacgaaagttcatcattcccgtctagaggaatcgcataaaggagcgggtctcttgtctccttactataaaaaccccacccttgatagtaaatagcatttaatttgttcgtaacagttggcgaaaaagataaagggtttgtaggaagagacgctatggttgtactagccaaaatcatgaatgaaagaacactgcaaaatagaagtgagattaagtacttatatttcataacagttcataaaattcctctcttatatatatttaatggcttgatgcctttgttttctttgcgctgatagacttttgatactagatcaaggaaaagcgtcttaaatagacctggattcctcccatttaaaaagcctgagagatgaaaaataatgacacctattttacagctgatcatcgaaagggcaatcacttagtgcaggatgacttttcgatctcttcaagccgtgcaaaatagaaataattttctgtcacccattttctagtatagatatctaatttgatttcacttgtcttcctactaattgtttatgggagaaggccattcaattataaaagaatttttcttaaaaagtatctaagtcaacgcaacaaactgactattcctatattaatgttaattccaatattaactaatgtcaacctaaaaatgataaattttagttaaattgtacccgtttataaattaggattatttcaaataaaagatccccactcatttgcggagatcacaaaatttttaatgtaacattttaatattaggattcttctctaaaagcttggagataaactcgtctttcctttttggggaaatactaattgtctcaaactgaccgtagttaatttcaattttgtccatggacaatgctggatcaatgaatggatcgattttcgaccttatagtacgaatatcatgaatatcaatcgtttttcttataggaccatacactattttcaatctagaaccagacaatgtatagcctgttcttccccatatccaaaggacaaaaaaagctattggtagtgtaatcagtgctttgacgatttggtggtttaaaaaagggggaagaataaaagcaagttgatcaggaaaaaaaagcggcatgataataaaaacgatcgctgtcgcaaaacaacaaatcgtcatacctaccccttttttagacggaaaatacacttcatacacctcctatcatctatattatgtatttactacctctaaattccttttatcttatcctacaatatatctcttctttttaaaaccttttattgatctcaactaatgccgtggctcatttttagtcaaacttcataagttaacagagaacttgctaagagatgatcatgcttgacgaaaatttatatagatctaggacatagcactcccaacctaggcactattggcaataggctgcatacaaaagtttaacattagccattagaatacaatccagatattttgcttaaatataaacgtttttagctatcgtaagttaaccttgtcttggcttcaaaagtcgcctactaatacaagaaaatggctatctcaaaacggacccagaatctattaagctcgcactctttcctttcccgctatttaaaaggaaacaagcggttgatcgtcgttcgtagaaagtaaagaggattagctaacaaaaaaagcgggagaagcacatcaaatgcttctcccgcttttaagccaacctttttacatcactctgttttttcaacaattcgttctgccaaacggtggtaaatctcaccaattggatgttcttgtgcataaacggacggggcaaaatcattttcatcaatctcaggctgcccgagaggaatttgcgcaagcaattccgtttttaattcttccgccaaacgttcgccgccgcccgttccaaacacatattctttctccccagtcactttgctttcaaagtaagccatattctctacaacgccaagcatttcatggtttgtttttatcgccattgcaccagcacgggccgcaacaaatgctgctgttgcgtgaggagtggtcacaatcagttcctttgaacctggcagcatggaatgcaaatcgagagcgacatcgcctgtacctggcggcaagtccaagatgagatagtcaagctcgccccattcgcattcagagaaaaattggttgatcattttcccgagcatcggtccccgccaaatgacaggagcattgtcttccacgaaaaagcccatggagatgacttttacgccaaagcgttcaacaggatggatgcgtttgttgatcactttcggccgttcctctatccccatcatgtcagggacactgaatccgtaaatatcggcgtcaatgatgccgacttttttgccgaggcgggcaagcgagactgctgtgttgacagagacggtcgatttgccgacgccgccttttccactcgccactgtaataaacgttgttttgctcgtcggcgcaagcaaagcaggaccgttaaagggctcttcttttaggccgccgagtgcgtctagttcttcttcagtaagggtatcaaaacggagtccgactgattcagcgccctcgcttttaaggacattgacaatttcttgttggacttgcatttgctccgctgttcccgtttttgctaaagcgacttttaggctgacatggccatttttgttttttagctcacggatgccgcctgtttctacaatactcttgtttaagtcacgatcttttattcgtttgagcgcttccattatttcttgatccgttatcatcgaggcaccttcctttaacaatcgatcctattttccccagtatagcatacataaatagcagaaagaactagagcgcttcgccctagttcttatcctttttagccgttcaccgcgacaatgcctttttcttttgccagaactcgtccttttttgttgatgacgacagccttgtccgctcctaagttggtaaacacgactggcgtaatcgtagaagcagcatggttacggatataatctaaatcaaattcggccaatttgtcaccttcgcttatttgatcgccttcttccacaaggacgtcaaatccttctccttgaagtttaactgtatcgatgccgatatggatcaacacttccattcccgtagaggtcgtcagtccaattgcatgtttcgtcggaaagacggtcgtcacttttccttcaacaggcgaataaaccatgccgtcttctggatctatcgcaaagccgtcgcccatcattttttcggaaaagacttgatctggcacctccgcgagcggcatcaacgtacctgccattggtgcaaggaacgccccctcattcatcaatgcgtctggctggatttcttccagttgctcactgacttcttcttgttgattcgtttttagtggccgaggcgtttttcccgccatgacatcttgaatttggcctttaagcgtctctgagcgagggccaaaaatcgcttggatgttgttgcctacttctagcactccagctgcaccaagcgcctttaattcgtctttattgacagctttaatatcattcaccgatactcgcaggcgcgtaatgcatgcgtcaagatgagcaatattgtctttcccgcccatcgcttgcaagacttgtcctgctagctcgcctgtttttcctttgcctttgtaatcattagccgtgtcattttctcgccctggcgtcattaaattaaatttttgaatcgcaaagcggaaaacgacataataaatggccgcaaatacgagaccaatgagaatcgtaatccaccattgttcttcattcggcaagatcccgaataggaaaaagtcaatcgctccgcctgaaaaggtgaacccaacatgaacatcgaataacgtcatcaaaacaaacgataagccatcgaggattgcatgtagcacaaacagtactggcgcgatgaacaagaacgtaaattcaatcggttctgtgattcctgtcaaaaacgatgtcagcgctgcagaagcaaacaaaccggcaaccagttttttcttctcaggcttggcacaatggtacatcgccagtgctgcagctggcaggccaaacataaaaatcggaaattcgcctgccatgaagtggccagccgtcaactccgcgccatcacggagttgggcgaagaaaatcagcatatcgccacggacaatttcccctgccgcattggtgtatgaaccaaattcataccagaacggagcatggaaaatatggtgcagtccaaaaggaattaaaagccgtctgataaagccaaacaaaaacacagctacatacaagctcgaccctaacaaaaactcagaaaagctgtttaagccgtgttggatcggcggccaaacaacaagcaaaagaagcgccattaaaaacgtagcaaccgctgtgataataggaacaaaccgtttgccggcaaaaaagccaagaaaagcaggcatttctatatcatagaagcggttatagcagtaagccgcaattaagccgacgataatcccgccaaatacgcctgtttgcagggtgtcaattcctagaatattagcaaagctcgggtcttcggctaccatttccgcgctcaccccaagccattggcccatcacggtattcatcaccaaatagccgactaatgctgcaagtgcagctgcaccgtcaccggcaaggccgatcgcgaccccgacagcgaaaataagagacaagttgtcaaaaataacgccgccagctgcttccatcacaccagccgtatgttgaatccagcctgcttctaagaacggcatgtagttcaatgtgttttccatttgcaaagcggcaccaatgcccagcagcaatccggctacaggcaacatcgcaaccgggagcatcaacgccttcccaattttttgcaatttgccaaatgcatttttaaacaataaaatcccctcctaaattggttttttatggtatgtagaaacacaaaaaaggcatgagcaaaaagacactggattggttttaaaacccagccatttctttttcctcatgcctgatcgaatcagttacacgaatttatttgcttttgctctgcaccctctgcaagtgcatcgtcaagtagacagcctcagcatcatatactggtttaccaagcgtcctttgcatgactttaatgagcttccaagaaagattataacatacaggatattcttgtttcaacagttttgcaaccgttttcggctcttcgactttttcaccagtcatcacccgttcaatcgtaaagcgcaaatgcctcacaaggcgaagataatccatgctttctttgtccaatttaattgcaaactggctttctacaagcgacaccagatgactaaccaattgcgaatggctattaacgatattcatgcttttattttgaatggcgctatgaatatgaagagcaataaagccaatttctccttcaggaagctcgacaccggtctgcttgccgacaagagctaccacttctttggcaattgcatattcacggggataaagcgctttcgtctctgccaaaaaagggttttcaatcgccattccttgggcaatacgagcatgggcaaaggacaaatggtccagtagcccgatatggatatgctcgtttaaatccatccctgcttttttcccaattagaaaaatcgcttccaccgtcacatcgatcatcgtttgcgaaatatgtggaagcagcttcaaatagctttgttgctctttttcatcttttaaaacaaacagtttctcaatgtcttgctgctcaagccaatccccatttttgcgggcaaagccgattccttttccaatgatgaccacttcttggttgtcacgctcagcaatgaccacattattattaagcgccttttttactttgtactcccccacattcatcactccaacagcatcttccctttcatggtaatccagggacagacttacgtcaacttaatcgttcactcgtgaggattgctgttcggcgctttttcatcggtaaaaaaccgaagcatcccttcgtaaatggaagcagccattttgtcttggtactcctctgtggcaagcaatgccgcctcctgcgggttagacagaaaacctgcttcaacgagcgctccaggaatttcggcttcttttaacaaatacacatggtggatcggttttgggtatcgattagtattttgcaaattgcgtttgatttcctcctggataaaaacagccatatcttcattgcgttggttttttaaatgataaaatgtttgtgccccgttccaacgttcagacggaatcgcattcatatgaatcgacaaaaacgcgtccgcttccgaatcgttgataatcattgccctttttcttaaatcttcagtttttcgctgccgtattttcgccgtgccagcatcagccaaatcaacgtcttcctcccgcgtcatgatgacaagcgccccagcttcctgcaaataatcacgcaactttaacgccactgccaacgtaacttctttttcaagcgtgcccgtctttgaaacggctcccccgtccatcccaccgtggccagggtcaaggacaatcactttccctgacatcggcaagtgccaagtagaagacgaatctttaagcgtgctgtcatattgaacccataataataccgctgcaaacaaaagcgccccaataaaaatgctccatttatgtttcttcacagtccgttcccccttgtcctgtatttatatatacgaggacaaggagaagttatgaacgattaatgaaggcgaagcttgtacgctttgctcgcttcccgaaagcctttttcccaccacgtgccaatcagcatgtcagaagcagcaagaagcgcttcagtcggcgctctttcttctttagaccaaccggttaaagtcgcacaaaggcaatgggacaaatcagtcaactcttcctcacaacgtttgcgcgcctcctgcgccggttcgccataataaccaaaacggccaaactctgtgccaagcaagtaagcatcaatcgtcatatccaaacattggtcaattaaaaaaggatacgcttgaaattggaacggaaggatcggaaacatccattcctttattgccttctccatttccttcatgctaatatggcgcaacatcttcttttcaaaattccactgtttttctcgtcttctttcggtaagtgtcgtaattacattcattggtcgtttccccttttttctttttagtatggtcgtccccatttgcaccatacacgtaagaaaaggtcaaataatgctgggataaccattatctgctgggctacatttgcgacgtgcattttaaaaaagggatattttttggtgatgttgcaaactataggaagaaaggataatgacgattaaacgccgctaaagacattgcatgcctcgggattatcatccgcaaatgttgacccgtttttcagcgtgaacagaggctgggacatttcattgccatcactcccacccttgatgccatggataggtttgtctactagactagatggaatcatccaatgaagagatgggctatcatgactgaagcaaaacgtccacgaaaaaggttcacagtcgaatttaagaaacagcttgtgcacctttatgggtccggaaagccgagagcggaaatcatcggactccatctgcatttgataaatgggttcgtcaatagtagtatgttttattatgaagccaaacaacgagattacgcgggagaggaagaaaccgctaaccacattcattagcgatcttttttatcaaagccaagacatctatggccatacaaaaaaagtacctcgacactcttctagccacattaaccaaacaaaaataccaagagcacttggcccttggcaacctaaaatttacaaacatacggcaaagaaggttctatcttccggatttacttcccctaattgtgaaagccagcgctttctaaacacgcgattacatttaaaacaatcctacactaacacgatctatttcaactttaagtgatagaaaagctgcaatagctaacacaattccacctattaacgctaaaacccttgaaaatatcgccagtttatcgacgtctgttagcatggaaatatcatcccttgtttttaacttctttgattagtgctgaagttcccaaacacctcaccaaatctcatgttatatatatctttcaccaccgggttaagcttaccattattagataagtctccctccagtataatttctactctttgatcattatcaactaatactgcttgcacgattaatgcatccagcaaaatcccagttactactgcaatttgttgaggggacaaactatactttttaaataaactttcaaaatgattatgttctttccccaaatttatcaccgacctccaaatttatgaagataatatttgtccacttccctctgttctttccgactttcttaaattgctcgaacctaaactaaagataccaaacaaaaagagcgctataaaaaaaacaacgtagcttttaaaagattgcgaactcattttatccccctaggcgtttaactcattttatgagcttgatgaagatatgtgactattcattggaagtattcacatttatttaagcccaacatattttaaattgttactacaattactggaggtacggcaacatggaaataaaacaaactgaaaatcatagtttgcaagtcccacatcgctattattcatatggcaccccttttccttaccaagctcaatatttctacccaagctatacaggggtacaaccatattatagctattacccgtacaatcaatatggtgcacagccatatcagacctataatccctcccccccatacgggcaacagatgtacccaagtccatatactcagcaagatgatgatggcgtcgaagaagtgttaccttatttatttcatcaccatataagccaccatcgcgatctcgaatggacaaatgaacagttaaaaaccagtctttacaacgcaatcttaggtgaacataatgcaattgcatgttacgatcaacttgctcaaatggctcccgatgaaccctcaaagagaataatattagaaattcgcaaagatgagataagacattatcaatcatttttaaagtattttgtgaacctattcggagaacaaccatccttttcaacacaagagaaatgcccaaatagttatcacgaaggcttaacaatagccttcgaagatgagcaaaacactgttgatgaatacttgaacatttccgattacattaatcattatcctgaaattagaaaagcatttaaaagagcagctaaagacgaacagaatcatgccgtttggtttttatacttgttgtttaaataggcttatttcagctcaagtcacgtcactttttgcgacaaggtttccaacagatcaagcatatcctcacttaatgtttctactttttcaaacaactcgtccccattgtccttggaattgggtataatggggaatttccatttctcatttcttgtagaaccgttgttaaaaccaatttctaaataagaagatttcactacaatatcctcttcttttacttgtttttcccatcttttcagcgcttggttgaaacgagctgtatacaattgtttaaggagttcaatttttatgtccataaaagtgcctcctataaaggtagtcataagcaataatatgaaattaaagtgttcattagaacatctttaattaaagttaagtctttataaatggtcatcctaaaaataaagaagcccttttcaacatcctttgttagaatgcatttaaggacttcttgtctcttttatatatgttaggctttacggatcttttggtaaacgaataaataagcggttttttattaaaagtaaaggattctttctcagcctgtttagccctaattgataaaggccaaattccatgcaaccctttgctgttcagaagcgaacccttgcgaccaatgttatttattaattcaacaaattgcttctatatggcagtccctctgaaaatttataaaaattttataaattttgtctggtaatgaaggcacatcgtaatataatgaaagagcaccatattggaggataatgaacgttaagccttacgcaactactggttccgagcattacagggagttaaattttaaacaggcggatggacatatgaaaaagaaatcaaagaaattctggcgttcttatttaatatttatgttatgttttgctgtcattttcttttttcctgatgatattcgatttatctttgttgttgcatttccaatcctcttttggggaatgtatggttttctgaataaccgtacgacgtagcatggaatacagaggtatggttcgcagatagctggcttgttcaccctaaaaaatcgtccacccttgagtgtccatgctcgtttagggtggattttattcctaatagggccgatcctcctggatagaaccgagctattgtataaatggtgacacaacttccatataccttctctaaggcttaacgttcgatcccattccgctaatgaactggaagaggacaaacgagaccaaattgcgcactagttgaaaaccgcatctaaccaatgcttggctatatgtcggagttttcttcgtattcgagtatatcaccaggctgacaatttaatgtctgacaaattttttctaacgtagcaaagcgaatcccacgcgctttgcctgtttttagtattgataaattagcttgagtaatatcaattttttctgctaactcttttgaagaaatgtttctttctagcattactcgatctaagttaatttttatcattaggcctcccacctaaatcacgttgttagaatcgtcttgcaaagatatgccatatttaaaaaccacataaagcgtataaatgatggctaacagaagaatgtttccgattaaacctggtgaagaatctgaaaagacatcactgacattgtatacatgcgcctgtgcaaagaacaactgactaatgatctgcaaaatggtaaagctcgtgatcgagattaagattagtttgagatacgtaagattttgggaaacaaaaaagtgttgtttataaatattaccaatcattttatgtagagcgtacataatgataaacaaacaagcaatgatggctagtgcgactaagcaagaaagtactaaaaaccatactggtaggtttgtgtttaaccctgcatactgtagcaattgcgttttgaccccgttcgacacgaccaataaagctccagccgcaaataagagtattaatccagcaaacgcaaataaaaattgagcaattagcgacacaattgacaggaattttagaacggtcttggtaaaaagattcattatatgccccccttaactatttattattgtaaaacgataacacattattgtcaaacaataatttttggttttaagggggttccaatttccgcactaaaaaacctctccccgatttcctcgggaagaggctgtaaacgttgatattaacgttttgagaactgaggcgcacgacgagcggctttaagaccgtattttttacgttctttcatgcgggcatcgcgtgtaaggaagcctgctgcttttagtgttgcacggttgtcaggatcgacttgtagtagggcgcgggcaatgccgtggcggattgcgcctgcttggccggtgaagccaccgccattgacattaacgtggacgtcatattggccagttacgcctgtttcaacaagtggttgttttacgatcaattttaatgtttcaagaccgaaatattcatcaaggtcacgaccgtttacaacaattttgccttcgccaggaatgaggcgaacacgggcaacagagtgcttacggcgacctgtgccgtagtattgtacttgagccataatcattacctcctaaagattaaccgcgaagctcgtatgcttctggtttttgtgcatggtgattgtgttctgagcctgcatagacgtgcagtttcattccttgtttgcggccaagagtgtttttcggaagcatccctttgatcgccaactcaagcatacgctctggcttgttcgcacgcatgtcttgtgcttttgtttgtttcaagccgcctgggtggttcgtgtggcggtagtaaatcttatcttggagcttgtttccagttagttgaattttgcttgcattcaaaacaatcacgtggtcgccagtatcgacgtgcggcgtgaatgttggtttgtgctttccgcgaaggatagatgctacttctgaagcaagacgcccaagcgtttgcccttcagcgtcgactacataccatttacgctcaacttcgtttggctttgccatatatgttgtacgcatagtttaaacctcctaaataataaacacgtttttatctgatcgttttgccaagagaaacacgttaaactggctgttttaatgcgcattccctttagcatagtcctttattccgtaacccggggcagtgggtcttaagaattgccatctaatatcatacaatatcggcttagtaaagtcaattaattcatagaaacttgtccgggtgtttcattcacaaaaagcggctggccgtagtccacctcatacaggcacaagccatgcgcaggggctgtttttccagccaggttgcggcttttgcctgccaaaatgactttcatttcagaggctacccgttttccagtgcctatttctagaagggttccgactataatgcggaccatattgtataaaaaaccagtgccgcggattgaaataagcagcccttcttcgctaggctggacggctacatgggtaatcgtcctgactttatcggtcacggttgtgttcgctgcacaaaaagcagaaaagtcgtgtgtccctaacaaatgcttagccgccgtttgcatcgctggcacatcaagagcttgtttaatgtggacagcaaaatggcggcggaacacattttcgaaaggtccgcattggatataataacggtactctttcgcctgagccccataacgggcatgaaaatctggttctaccattgccgcgtttgtgacgacaatgtcatcaggaagatgggtgtttaaagcagatacccaacgctcaggggcaatcgttaattctgtatcaaaatggagcacttggccacaggcgtgcactcctgcatctgtgcgccctgacgcaacaactgggactcgtgcccctttatgaatttcttgcagtgctctttcaacttcgctttggaccgtgcgtttgccgggctggacttggtaaccggcaaaagctgtgccatcatagcttagtttgcatgccattctagacatttccttttgttctccttcaactaaaaccaggcaagcaggaacgctacagtcgcactaacaagcagcgcatacgtatccttaaacgcccactggtttgttttccaggacgaccgttccctgttgcggctgtatccccgcgcctccatggcttgagccaactcttctgcacgctttaatgagcgaacaaatagcggcacaagcagtggcatgtacgctagtacgcgtttcatgaatggctggtcacggacgccaattccccttgctgcttgagcccgggatatcatgtgtaattcaccacttaaaatcggaataaagcgtaatgtaatcgacatcatcatcgcaaggtctgaaacgggaaattttactgcctttaacggcttcaggagcgattcaattgcccacgtaatatgcaacgggcttgtcgtcatcgtcaatagcgttgcagcaagaaaaagacataaagtgcgccatgctaaaatcccgccttcagcaaggccttcggcataaacgggccagccaaataggtgaaaaaccaagtggccttcccgcgttacaatcacttgcaacaaagcaaaggcaatgacaaaccatataatcggtttcagcgatttggcaaggacagggagcggcaccttgctagaggctatcgctgctgcaaaatagcacgctgataccgcaagcgttgcgggagaggcaacaaaaaatagcgccaatgcgacaatgaacacgctaagcagcttgctgcgcggatcaaggcgatgcacaaatgactcgcttggtctgtattgccccattaaaagcgatggtcctttcattgctgtcctcccttgcgatcgacgagccaatctgccaacgttgctgcatcgcgtaaaaaaggaatcgtcccttttgatgcgatggctttttgtgcaaaagccatcgcttttggcaaagccagttttgccgtttgtaacacgtctcccgcttgaaatacggcagcaggctcgtccaccattagcggcgtcccattatgcatcaccacgcaaaaatcggcgtatttggccacgtcgtccatcgaatgggtcaccacccaaatcgatgcattgtttgtttggcgatagttgcaaagcaattggaacagcgcctctttcgatgctgggtcaagcccggcaccaggctcgtctaacacaagcattttcggctgctggacgaggacagaagcaatggcgactcgtcgtttttgcccccctgaaagctgaaacggggaagcgctgagcaacgcaggcggcagcccaactgtgtgaagggccgcggccgcggttttcgccgcctcgacttttgagacgccctgcatccgtaggacatagccaatctctttttcgactgtttcttcaaatagctgatgttccggatattgaaagacaaagccgacctttttccttaacggttgtagctgttttttttgctcaggcagacaaacgtccccaatttcgactgttccttttgttggcaaaagcaaaccgtttaaatgctggaccaatgtcgatttccccgccccactagcaccaactacagcaacaaaccgacctgctggcacacggagcgtaacgccatgaagcgcttggaccgttttgcctgcatcgttgtattcgtagcttacttcgttaaatgcaacgtccataatgcctgcaatagctcctcttccgtttggggattgcctatcgccgcaccgcgcttgtgtaattcagcttggagctcatataaaaaaggaagtgcgatatcgagctgttctacttggtcgtgatcaaaaaatagctgggcaggtgtgccatcaaaaaccaaacggccctctttaagcgctaaaacacggtctgcaaagagcagttcttctggatcgtgggtaatggacaagatggtcttgcctttgcgatggagtttctttaatagcgaaagcccttccctttgcccagccggatctagcatggatgtggcttcatcgagaacgagaatgtctgggtcaggtgctagcacacccccaagggcgactcgttgcttttgaccacctgataagcggctcacatcccgttttagcaatgcttcaatgcctagttcctttgccactgctgcaacacgccgtgaaatttggtcaggtggccacccacggttttccagcccaaacgcaagatcatcttccacaatggttgtgacaatttgattgtctggattttgaaaaacaaaccccactgctaggcggattttctcggcatttgctgccgttgtccacttttgcaccgtcactgttccggaagagggcagcaataagccatttaatagccttgccaacgtcgatttccctgagccgctgtgcccgacaacggcaacccactcacccttttgaacgtgcagcgaaatatccgtgagcgcgtcggcagcatgattggcataacgataggaaacatgctcacaaacaagcatccccacaccccatttttttacgtaacaaaaaagggcatagagtgaaagaagcaccttgctcctattgtctcctgcccttaatcgccgcttacctgagctttttaaacaaactcaatgattgccattggtgcaccgtcaccacgacgaggaccaactttaagaatgcgtgtatatccaccttgacgctctgcaaagcgcggagcgatatctgcaaacagcttttggattgcatcttgccctgattcaacgtctgctatttcgttgcgaacgaacgctgcagcttgacggcgggcatgcaaatcaccgcgttttccaagcgtaatcattttttcaacgattggacgcagctcctttgcttttgcttcagttgtttcaatgcgttcattgatgataaggtctgtcaccaaatcacgaagcaacgctttacgttgtgagctcgtacggccaagttttgcgtatgccatgctaattccctcctttgagacaaaaacctattccttattcttcattgcgaagcccgaggccaagttcgcccaacttctcttgtacttcttcaagtgatttacggccaaggttgcggactttcatcatgtcttcctctgttttgtgcgtcaattcctgtacagtattaatgccagcacgcttcaaacagttgtatgaacggaccgataagtcaagttcctcaatggtcatttcaagtactttttctttttggtcctcttctttttcgaccatgatttccgcattttgcgcttggtctgttaaacctacgaaaatatttaagtgctccgtaagaattttcgcgccaagagaaacggcttcttctgggcgagtacttccatcggtccacacatcaagggttagtttatcatagtttgtgacttgcccgacacgcgtgttttcaacttggtagttaacgcgcgccaccggtgtatagatcgagtcaatcggaagaacgccaattggctggtcatcatttttgttgccttcagcaagaacgtacccacgacctcgtttcgcctgcaagcgcatgcggaacgatgctccttttgtaagcgtagcgatatgaagatcaggatttaatacttcaacgtcactgtcatgagtcaaatcaccggcagttacattgccttcaccttggacgtcaatttcaagcgttttttcttcatctgaataaattttcaaagccaattttttcagattcaagatgattgtcgtaacatcttctacaacgccttcaattgtcgaaaattcgtgaaggacaccgtcaatttgaacagatgtaaccgcagctcctggaagcgaggacaaaaggatgcgacgcaaggagtttcctagtgttgttccataaccgcgctctagaggctctacgacaaatttgccgtacttcgcgtcttcgctaacttccaccgtttcaatattcggcttttcaatttcaatcattaaacaaaccctccttcaaaacgtcgaactccggcaaacgcaaggattgcccaaagagctcctttatttgggcttccacctgagcaaatcctattagtcttaccttcattgtctatagatctcgtcttatccattatagacattagcgggaaatctatacaatgacgaatttcttacactctacgacgtttcggcggacggcagccattgtgtggaactggtgtcacatctttaatcatgttcacttcaagccctacagcttgcaatgaacggattgccgcttcacggccagctcctgggcctttaactgaaacttcgatcgttttcatgccatgctccatcgctgttttggcagctgattcagcagccatttgcgcagcaaatggtgttgacttacgagagcctttaaaaccaagtgcgccagcgctagcccaagaaatcgcattgccatgaggatctgtaatcgtcacaattgtgttgttgaatgtagaacggatgtgagccacaccactgtcaatgttttttctttgacgacgttttggacgagtattcgtttttttagccatgtttttcatttccctccttgcttattttttcttattcgcaaccgtacgttttggacctttgcgcgtacgagcattgttttttgaattttggccgcggaccggtaagccacgacgatgacgaattccacgatagctgccgatttcgattagacgtttgatgttcaaggaaacttcacggcgcaaatcgccttccacttgataaccttcaactgcttcacgaatacggccaagttcttcttccgttaggtcacgaacgcgtgtattttcgtcaacaccagctgtttcaaggatttttgctgctgttgatttaccaataccaaatacgtaagtgagtgagattacaacgcgcttatcgcgaggaatgtcaacacctgcaacacgtgccatgggctaggcacctccttatcatttaaccttgtttttgtttgtgtttcgggttttcacaaattaccataacattgcctttgcggcgaataaccttgcatttttcgcaaatcggtttgactgatggtcttaccttcattgtataaacctccttatatacggagagtgtttttatttataacggtacgtaatccgcccgcgcgtcaaatcgtaaggagaaagttcaaccgtaactttatccccaggcaagatgcggataaagttcatgcgaatttttccagatacatgcgcaagaattttatgaccgttttcaagttctacacgaaacattgcgtttggcaacggctcaatcaccgtgccttccacttctatcacgtcttcttttgccatgaatggatatcctcccttcgagtagatgcaagcaatacctttttgtcttcatcactgtacagacagtctatcttacctgaaaaattatgctttcgtcaagatctcgtatcctgtttctgtgattgcaaccgtatgctcaaaatgggcacagttctttttatcgactgtcaccactgtccagttatcagcaagcgtccgtacgtagcgagagcctgcattgaccattggctcaatcgccaataccattccaggcttcaacttcggccctttcccaggaggaccatagttgggaatgttcgggtcttcatgcaagtctttcccaatgccgtggccggcatactcacgtacgactgcgtatcctgactgttcgacaaaagtttgaaccgcatgggaaatatccgataggcgattgccagggcgtgccagttctaaccctttgtacaaagaagcctccgttgcatcaagcagcttttggtcttcttctttaatcgtcccgactccatacgtccaagccgaatcgccatgatagccattgtaataggcgcctatatctaagctgataacatctccatcttcaagcatgcgatcgccaggtatgccgtgcaccaactcttcgttcaccgacgcacaaatgcttcctgtgaaaccgccgtatccaagaaaagaaggcgttgcatcatgagaacgaataaacgcttcagctagtgcatccaactcaccagttgtaatgcctggcttaatgtaaggcttcaagtgggcatgcgttagggcgacaatctgcccggcttttcgcatcacgtcaagctcgcgttccgttttaatgacaatcatgcacgcttctccgatagaatcgcttttatgtcagcatacacagtgttcatgtcttggttgccgtccacttgtcttaagtagccttttgcttcataaaagtcaatgagtggcttcgtttgcttttcatttacttctaggcgtcttttgaccgtttccggcttgtcgtcgtcgcgttgaattaaatcgctgccgtcaatatcgcatttgccttccacttttggcgggttatacacaatatggtatgtcttacccgtagtaggagacacgcggcgtcccgttaaacgctccatcagaagttctttcgggactgcgatattcaacacatggtcaagctgtttgccgagggatgaaagaatgccttccagcgcttccgcctgggcaatggtacgaggaaaaccatcgagcaaaaacccattctcgcaatcgtcttccgacaaacgctctttgactattccaattgttacttcgtcagggacaagatcacctgcgtctataaacgacttcgctttcaagccaagctccgtttcatttttcatcgcagcgcgaaacatatcgcctgtagaaatgtgcggaatgccatagtcgttcacaattttctccgcctgtgttcctttgccggcgcctggcaatcccattaaaattaaattcattaagatccccttcctgcaagtcaaaaagacgaacgggtaaggcgtttgtcctgcccgtccttctttttagttaatgaagcctttatacgaacgtttaatgagctgcccttcgatttgtttcatcgtatctagcgcaacgccaacgatgattaacaagcccgtgccgccaatttgcacttgctgcggcaagtcaagtagcgcaataaacacaaccggtatcgttgcgatggtcgcaaggaatagcgcaccaacgaacgtaagccgatataaaattttcgtgataaaagactgcgttgcttgaccaggacgaatgccagggatatacccgccttgccgtttcaaattatcggccattttttccgggttaacctgtacaaaagtgtaaaaatacgtaaacgcgataatcaggacaacaaaaaggctgcctccgatccatgaactcggcacgaaatgttcgacaatccaccttgcccatgccttgtcctctggcccaacaaatgaagcaatggttgatggaaaataaaacaatgctgaggcaaagatgaccggaataacccctgaagcgttcactttaatcggcaaatgcgttgactgtccgcctacttggctgcgattgacaacgcgcttcgcatattggacaggtattttccgcaaggcttggtgcacgtaaatgacgccaatgataatcagtaatacgattaaagcgagcaatgcaacggtggcgatgctcaaaaataactggtcgcctgcgccttcaatttcagatgtatataaagcattcagcatgttcggaatgccggctgcaatacctgcaaagataatgagcgagattccattccctacaccatgagccgtaatctgctcccctagccacattaaaaatgctgtacctgctgtaaggacgatggcgatatagacatacgtcatcacagatggattttcaattaagccagggcctgctccttgatacattgaattaaaaccgactgacatggcgattgcttggacaaaccctaatacaatcgtgccatatcgagttacttgcgttagctttttccgaccagcctcaccctgtttcgcccattctgcaaacttcggcactacatcaagttgaagaagctgaacaacgatcgaggctgtgatgtaaggcatgatccccattgcaaaaatcgagaagttgcttagtgcgccgccgccaaaggtgtcgagaaacccgaaagcattagcgccgccaaaaagcatctcaagcgcatcactgttcgtgcctggcacgggtatgaatgcgccgattcgaaaaacaataagcatcaaaagcgtaaagatgatttttcgacgtaaatctctcacacggaagatgttggagatcgccttaaacattaaaccacctcggtttttccgccagcagcctcaattgcttttactgcagatgcagagaacttatgagcttttacagtcaagtttttgtctaggttgccattgcccagcactttaatgccgtgcttaacattttttaccgttttcgtttcaataagaagttctggagtcacttctgtgccagcttcaaaacgattcagcacgtctaggttcacaactgtatactctttacggtgaatgttcgtgaatccacgttttggcaaacggcgataaagtgggttttgcccaccttcaaatccaggacgaacgccgccgcctgaacgggctttttgccctttgtggcctttgcctgccgtttttccgttgccagacccgataccgcgacctacacgattgcggactttgcgtgaaccttctgctggttgtagttcgtgaagtttcatgcttcctacacctcctcgttatgaaaaatgatctatttacgcgtcgatctcattaacagtaatcaaatgtttaactttgtttaccattccgcggatcgctgcattatcttcttgtacgaccgtttggtgcaatttacgcaaaccaagcgtatttactgtcacgcgttgatcgcttgggcggccaatcaagctacgtgtaagggtgatttctaatttcttcgccatcgtaatccctcccttaacctaacagttcttctacggatttgccacgtagtttcgctacttcttcagcacgcttcaagtttgttaggccagttatagtagcgcgaaccatgttgatcgggttgcttgagccaagagatttggaaaggacgtcaccgatgccagcgagttcaagcacagcacgtacaggaccgccagcgataacgccagtaccttcagaggctggcttcaaaaatacgcgacccgcaccaaagcgcccaacaatttggtgtggaatcgttgtattaacgatcggcacttcaattaagtttttctttgcatcttctacagctttacgaatggcttcaggcacttcttgtgctttccccattccaaaaccgacgtgtccgtttttgtcgcctacgacaacaagcgcggcaaaacgaaaacggcgtccacctttaaccacttttgcaacacggttgattgtgacaactttttcttcaagttccaatgtgtttggatcgatagaacgcatatacgatgtttccctccttcgtaattagaatttaaggccagcttcgcgagcaccatcagccagctcagcaatacggccgtgatataagtagcctccacgatcaaagaccactgattcgaatcccgcatcaaccgcacgttttcctacaagttcgccgactttacgcgcagcttctttattgccgccgttctcaagccccaactctttgtcaagcgtagaagcttgtgcaagagttacgccattcacatcatcaataagctgagcgtaaatgtgcttagaagaacggaatacgttcaaacgtggacgctgcggcgtaccgcttagtgtgcggcgtacgtgagcgtgtcttttcttacggcctgcatttttgttaggcttcgtaatcatgagacgtcattcctttctatacgaaactaattatttaccagttttgccttctttgcgacgcacatattcgccttcataacgaattcctttgcctttgtaaggttcaggcagacgcacagcgcgaatgtttgatgcaagcgccccaactcgttctttgttgattccttttacaaccactttcgtattggaaggaacttcgatttcaaggccttcttcaggagtgatttcaactgggtgagagtaaccaacgttaagcacaagcttgttgccagatttggaagcacgataaccgacaccgttcagttctagcgcgcgttcaaatccttttgttacaccttcaaccatgttgtttacaagcgcacgcatcgttccgtgaagagcacggtgctctttatggtcagatgggcgttcaaatgtaatttcgttgccctcaacagtaatcttaatatccgggtgaagctcacggcttaattcaccttttggacctttgacagtgcaaaggtttccgtcgaatgtaactgtgacgccatcaggaataatgacaggttttttacctacgcgagacatttatgtccacctccattcatttaaagctacttaccaaacgtaagcgagcacttctccgccgacttgttgttgacgtgcttctttgtcggtcaaaacgccttttgaagttgaaacaagcgctatgcctaagccaccaagaacacgtggaagttcagttgattttgcgtatacgcgcaatccaggttttgaaatacgcttcaacccagtaattacacgttcgttagatgggccgtatttaaggaagatacggattacaccttgtttattgtcttcgatgaattcgtaatcgcggatgaagccctcgcgcttaagaatatcggcaatctcttttttaagcatagaggccggcagttctagtttttcatggcgtacaaggttcgcattacgaatacgtgtcagcatatctgcaattggatcagtcatgaccattgataattacctccttccaatcgtttttaccagcttgcttttttcacgccaggaatttgccctttgtaagcaagttctctgaagcaaatacggcaaagtttgaatttgcgcagcactgagtgaggacggccgcaacgctcacaacgagtataagcttgaacattatacttcggtgtgcgtttttgctttgcgatcattgatttttttgccaacgtgttccctcctcttcttagagattatttttggaacggcatgcctacttgagtaagtaattcacgcgcttcttcgtctgttttcgcagttgtgacgatgacaatgtccatcccgcggactttatcgactttatcgtaatcaatctcagggaaaataagttgctctctcacgccgagcgtgtagtttccgcgaccatcaaacgcttttttggatacaccgcggaagtcgcgaacacgtggcaatgaaacagatactaatttatccaagaagtcatacatgcgctcgccacgcaatgttacttttgcaccgattggcataccttcacggagtttaaagccggcaatcgatttttttgcttttgtaatgacaggcttttgaccagtgatcgcttgcagttcttcaacggctttgtcgagcactttcgcattttgaacggcatcgccaatgcccatgttgacaacaattttttcaatctttggcacagccattacagatgggtaattaaacttctctgttagagaagaaacgatttcgttttggtatttctcttttaaacgattcattgaaatggtcctcctttcacacactgactacttgatgatttcgccagatttttttgcaacgcgtacttttttgccgttttcttctttgtagcccactcgagtgcgttcacctgtctttggatcaacaagcatgacattggaagagtggatcggtgcttcttggtttagaattccgccttgtgggttgtcttgcgacggcttggcgtgttttttcaccatgtttacaccttcaacgagcacacggctttttttcgggtaagcttctagtaccgtcccttgcttccctttgtctttgcctgtaatgacaacgactttgtcgccttttttgacatgcatacaatggcacctccttcagcttagttcatcaattctctgcttaaagaacttctggagcaagagaaacgattttcatgaactggttgtcacgaagttcacgtgcaactggtccaaagatacgagttccgcgcgggcttttgtcgtcacggacaatgactgctgcgttttcgtcaaacttgatgtaagaaccatcattgcggcgtacaccactttttgaacgaacgattacagcttttacaacgtcgcctttcttgacaacgccccctggtgttgcttcttttaccgaacaaacaatgacatcgccaatgttcgctatcttacgcccagagccacctagcactttaatgcagagcacttcacgggccccagagttgtcggcgacttttaagcggctttcttgttggatcattcagttttacctcccttcaacggacgcattgtcaaatgatgatcgcttcttcgacgatctctactaaacggaaacgtttatcttttgaaagcgggcgtgtttccataatgcggacaatgtcgcctacttttgcagtgttttgttcatcatgcgctttaaatttctttgagtattttacgcgttttccgtaaaggcggtcttttttatacgtttcaacgagtacagtgatggttttatccattttatcagaaacgacacgcccttggtaaactttacgctggttgcggtccatgcagcaaaccctcctttagccgttgttaattccgagctcacgttcgcgcaagaccgttttagcacgagcgatgcttttacggacttcacggatacgaactgggttgtcaagttgtccagttgcgagttgaaagcgtagattgaataactcttctttaagagattgtgtcttttgttcaatttcagcagtggttaaatcgcggagatcagttgctttcatttgagtcaccacccacttcttcgcgttttacaaacttacatttaatcggtaatttgtgagaggcaagacgtaatgcttcgcgggcaacttcttcagatacaccggaaatttcgaacataatcttacctggtttcacaacggcaacccatccctcaggtgcccctttaccagaacccatacgaacttcaagtggctttgctgtgtatggctttgaagggaaaattttaatccatactttaccgccacgtttcatgtaacgagtcatcgcaatacgagctgcctcaatttgacggtttgtaatccatgaagcttcaagagcttgcaagccaaactcgccaaagtggacttctgtaccgccttttgcacgtccgcgcatttttccgcggtgttcgcggcggtattttacacgtttaggcattaacatgattagttgcctccttcctctttgttcgttcctttcgttggaaggacttcaccacgataaacccagatttttacgccgattttaccgtatgttgtatcagcttcagctgtaccatagtcaatatcagcacgaagcgtgtgaagtggaacagttccttcgctatagtgctctgcacgagcaatgtctgctccgccaaggcggcctgacacttgtgttttaattccttttgcaccagcgcgcatagtgcgttgaattgcttgtttcattgcacgacggaatgaaatacggttttcaagttgacgagcaatgttttcagcaacaagctttgcatcaaggtctgcttgcttgatttctgaaatgttaatgtgcacgcgttttcctgttagctcattaagagatttacgaagcgcttcaacttctgaaccgccttttccgatcaccatacctggcttggcagtagaaattgtaatgttcacacggttcgcagcacgctcaatttcaactttagagacagaggcatctttcagacggccttctacatgctcgcgaatcgcgatgtcttcgtgaagcaagtctgcgtagtctttcttgccggcataccatttagaatcccaatcacggatgacgccgacgcgcagaccgactggatttactttttgacccatatgttatccctccttcttttctgttacaaccaatgtaatatggcttgtgcgtttattgatccggctagcgcggccttgtgcgcgagggcggaaacgtttcagcgttacgccttcgttcacgtacgcttcagatattacgagattgtttggctccatttcatagttgtgctcagcgttcgcaattgccgaatttaacagcttttcaactactggagaagcagctttaggcgtgtgttttaaaatagcgatggcttcaccgacttgcttaccacgaataagatcgatcacaaggcggactttgcgaggcgctatgcggacttgcttcgcaacagctttagcttgttccatgagaaaaggtcctccttccttacttagcgtcttgttttcttatcagcggcatgccctttgtacgtacgagtaggggcaaattcgccaagtttgtgaccaaccatatcttcagaaacgtaaaccggtacatgcttgcggccatcatagacagcaaacgtgtggccgataaaatcagggaaaatcgttgaacgacgagaccaagtcttcacgactttcttgtcgtttgttgcgtttaatgcttctacttttttcatgagatgaccatcaacgaaaggtccttttttcaaactacggcccatgtatgttcctcctttcgggattcgtccacggttctgcgtgagaaccgcaggcaaaccacgttattttttacgacggcgaacaatgtacttgtcggagtgtttgtttttcttacgtgttttgtaaccaagcgtcggtttgccccatggtgacattggtgacggacggccaattggcgcttttccttcaccaccgccatgcgggtgatcgttagggttcataacagaaccacgaacagttgggcggatgcctttccaacgcgaacgtccagctttaccgatgttaatcagttcatgctcaacattcccgacttggccaattgtagcgcggcaagtagataaaatgtagcgtgtttcccctgagttcaaacgaacaagggcataatcgccttctttaccaagaagctgggcttctgtgcctgctgaacggactagctggccgccttttcctggacgaagctcgatattgtggatcactgtacctactggaatattcgctaacggcaatgcgttacctgttttaatgtcggcatcaggaccggacacgataacagtgccaactgttaggcctttaggcgctagaatgtaacgcttctcgccatcggcatagttgattaaagcgatattcgcggaacggtttggatcgtattcgatcgtggcaacgcggcccggaattccatctttgttgcgtttaaagtcgataacacgatattgacgtttatggccgccaccttggtgacgtacagttaaacgaccttggttgttgcgtccgccttttttatgcaaaggagcaagcaacgacttttccggcttgtcagtcgtaatttccgcaaagtcagatacgctcatattacgacggccggcactggtcggtttatactttttaattgccatttttgtgattccctccttctcttgttacttacacttcaaagaagtctagttctttactgtcagcagaaagctgaacaattgcttttttgcgtttaggggtaaagcccgtgtagcgtccgaaacgcttcgctttccctttataatttactgtgttaacgtttgtcactttcacttcaaagatttcttcaatagcatctttgatttgcgttttgttggcgcggacgtcaacttcaaacgtgtattttttgtcttccatcagttcagtagaacgttcagtaatgacagggcgcttaatgatatcacgtgcgtttgacattacgcaagcacctcctctaccttttcgactgcgtctttagtgatgacaagcttgtcatgtttaagcaagtcaagtacgttcacgccgtcggctgtaaggaacgtgatccctggcaagttccgtgcagacaaagcaacattttcgttgtagtcagctgttacaacgagtgcttttgaatctacagaaaggcttgcaagcacgtccttcatagctttcgttttgattgcttctaatttcaagtcatctagtacaaccaactctgagtctttcactttagatgaaagcgctgatttaatagcaagacgacgaactttcttcggcagtttatagctatagctgcgcggtgttgggccaaatactacgccaccgccaacccattgtgggctgcgaatggaaccttgacgagcacgcccagttcctttttgacgccatggctttcttccgccgccgcgaacttctgaacggccttttgttttgtgtgtaccttgacgaagagatgcttgttgcataacaaccgcgtcatgtaagacactttcatttggctcaacaccaaaaacgttgtccgctagttcgatctctcctacttgtgaacctgtttggttaaaaagtgatactttcggcattcgaatggcctcctttcttaagcgttacgccttaactgcagattgtacagttacatagcttttcttagcccctggtacgttgcctttaacgagaagcaagttgcgctcttcgtcaacgcgaacgatctcaaggttttgcattgtaatttgttctccgcccatacggccaggaagcgcttttcctttaaatacacggtttggcgctacagggcccattgaacctggacgacggtggtaacgagagccgtgtgacattggtccacgggattggttatggcgtttgatcgcgccttggaaccctttccctttagatgttcctgttacgtcaacaagatctcctgctgcaaatgttgttacgttaatcgcttgacctacttcaacttcgtcaagattaacgccacggatttccttaatgaagcgcttaggagccgtttcagctttagcggcatggccagtagctggtttgttcggctttttcgcatcagcaaaaccgatctgaatcgcctcatagccatcagattccactgtcttcttttgaaggacaatatttggttctgcttcaattactgttactggaatgacttctccgttttctgcaaacacttgagtcataccgatttttctacctaagattcctttggtcatccgttacacctcctactattgttcgttttatatagtcttacagttttatttcaatatcaacgccagatggtaaatccaaacgcatcaatgcatcgactgtttgcggcgttggattaatgatgtcaattagacgtttgtgcgtacgcatttcaaactgctcgcgggaatctttgtatttatgaaccgcacgcagaatcgtgtagaccgatttttcagttggaagtggaatcggacctgaaacgctcgcacctgaacgttttgccgtttctacaatcttctcagctgattgatctaacacacggtgatcatacgcttttaaacgaatacgaatcttttgttttgccatgatagccctcctttatcgtccatttttaaaatagacatactccgcggaaatttcctcaccctcccatggcaaaggggccgggtgtgtcagcaaccttccgcatcatcgctgtcaacgtgcaaacacgaaaataaccgtttcctacctttctcctaggcatgaaacgtaaccatcgggcacacttctactattatatagatttaggccaatgaacgcaagggattcaagaaaaaaacataaaacaaaagaggacgatcgataaccgtcctctttttggcataagcatcagcttattcagtaatagtagaaacaacgcctgaaccaacagtacgtccgccttcacggatagagaagcgtgtaccttcttcaattgcgataggcgcaatgagttcaactgtcatttcagtgttatcgccaggcataaccatttccgttccttctggaaggtgtacaacgccagttacgtccgttgtacggaaatagaattgtggacgatagttagagaagaatggcgtatgacgtccaccctcatctttagaaaggacatacacttcagcagtgaactttgtgtgcggcgtgattgtgcctggttttgcaagcacttggccacgttggatttcttcacgggaaacgccacgaagaagcgcaccaatgttgtcaccagcttctgcatagtcaagaagcttacggaacatttctacacctgtaacagttgtagattttttctcttcgttgataccaagaatttcaaccgtgtcgccaacattcaattggccacgctctacacggccagtcgcaactgtaccacgaccagtgatagagaatacgtcctcaactggcatcataaatggtttgtctttgtcgcgttctggagttgggatgtactcatcaactgcattcatcaattcgatgattttttcttcccactcagcttcaccttgaagagctttaagagcagaaccttggataacaggaacatcgtcgccagggaagtcgtactcagaaagaaggtcacgtacttccatttcaacgagctcaagaagttcttcgtcatctaccatgtcgcatttgtttaggaatacaacaaggtaaggaacacctacgttacgagaaagcaagatgtgctcacgagtttgtggcattgggccgtcagcagcagatacaactaggataccgccgtccatttgcgcagcaccagtgatcatgtttttaacatagtcagcgtggcctgggcagtcaacgtgtgcatagtgacgagagtctgtttcatattcaacgtgtgctgttgaaatggtgataccacgctcgcgctcttctggagcaccgtcgattgcgtcatatgccattgcttggcctttaccagaacgctttgcaagtacagttgtaattgcagctgttagagttgttttaccatggtcaacgtgtccaattgtaccaatgttggcatgtgttttggagcggtcgaatttttcttttgccatgagtcattttcctcccttaaatacggatttgattttatgtcaataagaaaggacggctgaatggacagcctattcctcccctagcttacaacaaaaaatgtcgcaaaacaacgagaagtaattaagcacccgtttgttttttgataatttcttcggcaatgctcttcggcacttcttcgtagtggtcaaaaaccattgagtatgtgccacgtccttgcgtacgagaacgaaggcttgttgcataaccgaacatttctgcaagcggtacaaacgcttttacaacttgcgcatttccacgtgcttccatgccttcgacacggccgcggcgtgctgtaacgtcacccataatgtcacccatgtattcttctgggacgacaatttcaacttttgaaatcggctcaagcagaactgggtcacattttgacttagcgtttttaagcgccattgaagcggcgatcttaaaggccatttcagaagagtcgacatcatggtatgaaccgtcataaagctttgctttaatgtcgatgacaggatagcctgcaatcataccgttttgcaacgcttcttcaatacccgcttgaacggatgggatgtactcacgaggaacaacgcctccgacaatcgcgttttcaaattcaaagccagcgccttcttcgtttggcgagaactcgacccaaacgtgtccgaactgaccgcgtccaccagattggcgaacgaattttccttccacttgtgcagcagtacggattgtttcacggtaagaaacttgcggcgcgccaacgttcgcttcgactttaaactcgcggcgtagacggtcaacgataatgtcaaggtgaagttcacccataccaccaataaccgtttcacccgtctcttcatccgtaaatgttttgaaagtcggatcttcttcagcaagctttgcaagcgcaatacccattttgtcttggtcggcctttgatttcggctcaacagacaaatggataactggctctggaaattccatagactctaaaataacaagatttttctcgtcgcatagagtatcgccagttgttgtatctttcaaaccaacagcagctgcaatatcgccggagtaaacagttgaaatttcctcacgggagtttgcgtgcatttgcaggatacgtccgatacgctcacgcttgtctttcgttgcattacgaacataggaaccagagttaagcgtacctgagtaaacacggaagaatgtaagcttccctacaaacggatccgtcattactttaaaagccaatgcggcaaacggttggtcgtcaccaggctcacgcgttacttcttcgtctgttccagggacttggccgcggattgctgcgacgtcaagcggtgatggcaagtagtcaagcactgcgtcaagaagcgcttgaacccctttgttcttaaaggcagtaccacaaacgactgggtagaactcaacattacaagttcctttgcggatagccgcttttagctcgtcttttgttaattcttcgccttctagatacttcatcatgaggtcttcgtctaattctgctacagcttcaaccaacgattcacgaaggctttccgcttcatctttatagtcagcaggaacttcagtaacttcccaatcttggcctaagtcgtctttcgaaatatgcgcttgcatttcgatcaaatcgacaaaaccaacaaaatcgtcttcagcgccaatcggcaactggattggatgtgcattggcctgcaaacggtcacgcaaagtacttacagaatacatgaaatcggcaccggttttatccattttgttgatgaatacaatacgcggcaccccgtatgtcgtcgcttgacgccatactgtctctgtttgcggctcaacgcctgattgcgcgtcaagtaccgcaacagctccatcaagtacacgtaacgaacgttcaacttcaaccgtaaagtctacgtgtccaggtgtatcaataatgttgatacggtggcctttccactgagctgttgtagccgcagacgtgatcgtaatgccacgttcttgctcttgctccatccagtccatttgggaggcaccttcgtgtgtttcaccaatcttgtgcacacgacctgtgtagaacaaaatacgttctgttgtcgtcgttttaccggcatcaatgtgggccatgatgccgatattacgcgtatcttttaaggagaattctcttgccataggttcgttctcctttctctatcgagtgaataaaattcttaccaacggtaatgagcaaacgctttgttcgcttctgccattttgtgcgtgtcttcgcgcttcttgacagctgcgccagcattgttggctgcatcaagaatttcgttagcgagacgctcttccattgtcttttcgccacgaagacgcgcgtaattgaccaaccaacgcaaacctagagtcgtacgacgctctggttttacttcgattggcacttgatagttagaaccgccgacacggcgagctttcacttcaaggacaggcataatgtttttcaacgcttgatcgaatacttccattggatcgttaccgctacgctcttttactagttcaaacgcattataaagaatcgtttgtgctgttccacgcttcccgtcaaccatgatgcggttaatgaggcgggtaacaagtttagaattgtatattggatcaggcaatacgtcacgacgtgtaactggacctttacgaggcatgtttccccctcctttcaacatttatctacattaaaaacgtaggttatttcttatcttttggcttttttgtaccgtattttgaacggccttgcatacggttttgaacaccagcagtgtcaagagcgccacgcacgatgtggtagcgtacccctggcaagtcttttacacggccaccgcggataagcacaacactgtgctcttgcaagttatggccaatgcctgggatgtatgcagtaacctcaatttggtttgtcaaacgcacacgcgcatatttacgaagagccgagttcggtttcttcggcgtcattgtgccgacacgagtacaaacaccgcgtttttgcggagaagacacatccgtttgtgacttcttaaaactgttgtaccctttgttcaaagcaggcgagtcagactttttcactttgtctacccgacctttgcggattaactggttaatagtaggcatgttgtgttcctcccttccacatttttaagaccactgatccaggtggttcatgtttaggcaaaagaatatattgtaaggcgtaagcgccaaacaatatcgttacttccttaacgctacagcagcagcgccaacatcaattccgcaagcttttcctagccgtttcattgagtcgacatacacgaccgtcacatctgtatctttcgcggcttccactacgtctgccacaactcgtgggtcagcgtcttttgccacgtacaattcactgactaaacgagcgtgtaaagctttttgtgtctgtttcttaccgataatcggatcttttgcctgctccactttttcataagacatcattctcatcctccaaagcaacaggcctcatcaggcacactttgatatattatcaccgcctgataggctgtgtcaacagcctatcgcggcgattctaaaattaatcttggacaagcacttcttctggcgtacccgcttcttcattctccgctctttcatcatgcgcggaatgaatgccgagcgttttatagcgagccagccctgttccagcaggaacgagtttgccgatgatgacattttctttcaagccaagcaactcgtcgcgttttccttttatagcggcatccgtcaagacacgtgttgtttcttggaaggaagcagcagacaagaaggaatccgtttcaagtgacgctttcgtaatgcctaacagcactgggcggccggtagccggacgcatattgcttaacaatactttcttgtttgcttcgttaaagcgttgaatttcaacgagagagccaggaagaatgcctgtatctccagcatcaacgacacgcactttgcgaagcatttgccgaaccattacttcaacgtgcttatcgccaatttctaccccttggagacggtatactttttggacttcgcggagcaagtattcttgtacgccacccatacccgttactttcagaagttcttttggatcaatcgaaccttctgttaacgtttggccagcaacaaccttgtccccgactgccactttcagacgagagccatacggaatcgagtaatttttcgtctcgagttcactttgtacagtgacttcacgtttgtcgccgtctctgacatcaaccacatcgccgtcaatttcggtaataacggcctgcccttttggattacgggcttcaaacagctcttgaatacgtggaagaccttgggtaatatcgtctccagcaacaccgcctgtatggaacgtccgcattgttagctgcgttcccggttcaccgatggactgggcagcgataataccaactgcttcgccaacttctacatcgctgcccgtagcaaggttgcggccatagcaagccttacacacgccgtgatgggtgttacaagtgaagacagaccggattgttactgattccacaccagcatcaacaatttgtttagctgtatcctcattcatcaactcgccacggcggacaaggacttcatccgtttctggatgacgcaccgttttgaaagcaacacggccgactaaacggtcataaaggccttcaatcgtttcggtgccttctttgatcgccgtcacttccaaacctcggtctgtgccacagtcattttcacgaacaatgacatcttgggctacgtcaacaaggcggcgcgtcaagtaacctgagtcagccgttttgagcgctgtatcggcaagacctttccgggcgccgtgcgttgaaataaagtactcaaggactgtcagcccttcacggaagctcgatttaattggaagttcaatgatccgtccagatgggttggccatcaaaccacgcataccagcaagctgggtaaagtttgaggcgttaccacgagcgcctgaatcactcatcatgaagattgggttgcgggcatcaagcgtacccataagcttgctttggattaagtctttggcgtcgctccaaattgagatgacgcggtcgtagcgctcttcttccgtgatcaaaccacggcgaaattgcttcataatgcgctctacttttttgtccgcttcatcaagaatttctttcttctcggaaaggacgacaatgtctgacacgcctaccgtgataccggctttcgtcgaatacttaaagccaaggtctttcatccggtcaagcatcttagacgtttccgtaatcttgaatttcttgaagacttccgaaatgatgtttccaagaaaccctttcttaaatggcggaacgagatcccgttctttcaagagttcttttacattggtgttgcttggcaccaagtatttttctggcgtcttcacttccaagttcgacgccgtcggctcattaatgtacgggaacgagtcaggcataatctcgttaaacaaaagttttccgactgtcgtcaatagcaacatgttcgactcttcatcagcaaacgtcggtttattcagcgatgccactggaacagcgatacgtgtatgcaagtggacatagccgttttgatacgcgatcaacgcctcgttggaatctttaaatacagagccttccccacgggcatttgcattttccatggtcaaataatagttacctaaaaccatatcttgagaaggcgttacaacaggtttgccatctttagggttcaagatgttttgtgcagcaagcatcagaatgcgtgcttccgcttgcgcttctgccgacaacggcacgtggacagccatttggtcgccgtcaaagtcggcgttgtatgctgtacagacaagcgggtgcaatttaattgcacggccttctactaagataggctcaaacgcttgaattccaagacggtgcaatgtcggtgcacggttcaggagtacagggtgctcgcgaataacttcttcaagcacatcccacacttctggctggacacgctcgactttccgcttagcgctcttaatgttatgggcaagccctttagaaacaagctctttcatcacaaaaggcttaaataattctagcgccatttctttcggaagcccgcattggtacattttcaagttaggaccaactacgataaccgaacggccagagtagtcaacccgttttccaagcaagttttggcgaaaacgcccttgtttcccttttagcatatgggacaatgattttaacggacggttccctgggccagtaactgggcggccgcggcggccattatcaatcaaggcatcgaccgcttcttgaagcatccgcttctcattttgcacaataatgttcggcgcccctaaatcaagcaaccgtttcaaacggttattgcggttaatgacgcggcggtacaagtcatttaaatcagaagtagcaaaacggccaccgtctagctgtaccattggccgtaattctggcggaatgacaggaagaacatcaagcaccatccatgacggttcgttaccagaattgcggaatgcttccagcacttctagccgtttaatcgcacgtgtacgccgttgcccttgcgcggtttcgagctcttctttcagggcattgacttctttttgcaagtcaatgtcggcaagcaatttgcgaatcgcttccgcacccatagaagctgtaaatgtacggccgtatttatcgtaataagcacggtactctttctctgacaaaagctgttttttctctagtggtgtatcgcctggttcagtcactacataagaagcgaagtaaatgacttcctcaagggaacggggcgacatatcaagcacgaggcccatccgacttggaattcccttaaaataccaaatatgcgacacaggagcggcaagctcaatatgccccatccgttcccggcgcacttttgcacgggtaacttcaacgccacagcggtcgcaaacgacccctttgtaacggacacgcttatattttccgcaatggcattcccagtctttctgcggcccaaaaatacgctcacagaacaaaccatctttttccggctttaatgtccggtagttgattgtttctggttttttaacttctccacgggaccacgagcggattttatttggtgatgccaaaccaattttcatgtattcaaagttatttacatcgatcaaggggccaacctcccttatgatttcacccaatgtgggtaactgttcaatgcggattattcttgaggggcaaaggggaagaaacgaatgtttctcccctcagactgtagacaaacgctcgcatacgtcgtcgtttgtctcggtcatatgctcatgaacacacgttctattcgcatcttccctcggctgcactcctcgtctgacaagcgtcctcggtcatctgctttagaacggtccttccatgcgcaagcactgttgctcatgaacagcgttcgattcgcatctcacctgccctttatagttgtgattcgttcgtctctaaattgaggttgagtttttcagacgtttggtcttcttcgtcatccagctcgcgcatttcaatttcttcttcgttgctggagagcatcttcacgtccatgcccaacgattgcaattctttaatgaggactttaaacgattccggcacccctggctcaggaacgttttccccttttacaattgcctcgtacgttttcacacgaccaacaacgtcatctgatttaacagtgagaatttcttggagcgtgtaagcagcaccgtatgcttccagtgcccatacttccatttccccgaaacgctgtccaccaaattgagctttaccgccaagaggctgctgcgtaacgagtgagtacgggcctgttgaccgggcatggagcttgtcgtcaaccatgtgggcaagcttgatcatgtacataatcccaacagatacacgattgtcaaacggttcgccagtacggccatcatataaaatcgtttttccgtctcgggccatgcctgcttcttccaatgtgccccaaacgtcttcttcactagcgccgtcaaatactggagacgccacatggatgcctagtttgcgggcagccataccaagatgaagttcaagcacttgtccgatattcatccgcgaaggtacgccaagtgggtttaacataatgtcaacaggcgttccatctggtaaaaacggcatatcttcttctggcaggattcgggaaataacccctttgttcccgtgacggccagccattttatcgccttggttaattttccgcttttgtacgatgtagacacggacaagttggttgacgcctggaggaagttcatcgccgtcttcacggttaaagattttcacgtcaagaacgattccgtctccaccatgcggtgcacgcaatgaagtatcccgcacttcacgggctttctctccaaaaatcgcgtgcaagaggcgttcttctgccgtcagctctgttacaccttttggcgttactttaccaacaagaatgtcgccatctttaacttcagccccgatacgaataattccccgctcgtcaaggttgcgtaatgcatcctcaccaacgttcggaatatcgcgtgtaatctcttcaggtccgagttttgtatcacgggcatccgattcatattcctcgatatggatggacgtataaacgtcatctttgacaaggcgctcacttaaaatgatcgcatcctcgtagttgtagccatcccatgtcataaaggcgacaagcacgttgcggccaagcgccatttcgcccatctccattgaaggaccatctgctaagatttcacgtttttcaatgcgatcgccttcgcgtacaatcgggcgctgattataacttgtgccctggttggagcgcacaaatttttgtagtttgtatttatcaaggtcgcctttcgtttctttgccatctacttcttcgatgcggcggacccaaatttctttagcagtaacacgttcaacgataccggcatattttgagacaacggcagcccctgaatctttagcagacacgtgctccatccctgttccgacaagcggtgcttctggaacgagcaaaggcacggcttggcgctgcatgtttgcgcccattagtgcgcggttcgagtcgtcattttccaaaaaaggaatacatgacgtcgccgcagaaacaacttgtttaggcgaaacgtccatatagtcgacacggtcgcaaggaacgacggtgttttcaccgcggaagcgggcaataatgttatcatcgacaaacgatccgtcatcattcagcttcgcattggcttgggcaactacataattgtcctcttcatcggctgttaaatagtcgattcgcgatgtcactttccctgtttcagggtcaacacggcggtatggtgtttccataaaaccgaactcattcactttcgcgtaagaggacagcgtgttaatcaagccaatgttcgggccttccggcgtttcaatcggacacatccgcccgtaatgggaatagtgaacgtcacgtacttccattccagcacgctcacgagttaaaccgcctgggcctagcgcagaaagtcggcgcttatgcgtcagttcagcaagtgggttcgtttggtccatgaactgtgaaagctgcgagctaccaaagaactcttttatcgatgcgatgactgggcgaatgttaataagcgcttgtggcgtaatcacattcgggtcttgaatggacatccgttcacgcacgacgcgttccatccgagaaaggccgattcggaattggttttgcagcagttccccaaccgaacggagacggcggttgcccaaatggtcaatgtcgtctgtatcgccgacaccatgcagcaagttgaagaaatagctgatggaagcgatgatatccgcaggggcaatatgttttacgtcgcgttcaaccatgccgttgctaataacggaaatgacgcgctcgccctcatagtcatctgctacataaattttaaccgattggatttcgacgtcggattcctcaagaacgccgccagatgttcgagctgtacggaaaccaacatttttctccaaatgcgggatcagtttatccaacgttctccggtcaagcagtgttccctcttcagctagaacttcgcctgtctccggatcaacaagcttttccgccaaacgttggttaaatagccgatttttgatatgaagctttttatttattttataacgaccgacatttgcgaggtcataacgcttaggatcgaaaaagcgagattcaagcaagcttttcgcattttctactgttggcggctcgcctgggcgcaaacgctcatagatttcaagcagcgctttatcggttgaatccgtattgtctttctctagcgtgttgcgcaaatactcgttttcgcctaaaaggtcaacgatttcttgatcagacccaaagcctagagcacgcaaaagtactgtaactggaattttacgagtacggtcaatacgtacataaacaatatcttttgcatctgtctcaagctcaagccacgctccgcggttcggaatgacagtggcagtaaagcctttttttccgtttttgtcgagcttttggctatagtaaacgctcggtgagcgaacaagctgagaaacgataacgcgctcagcgccattgatgataaatgtccctgtttctgtcatcaacgggaaatcgcccataaagacttcctgttcttttacttcgcctgtctctttattaataaggcgaactttgacacgtagaggagcggcaaaggtcacgtcacgctcttttgactcatcaacaggatactttggttctcctagactgtaatcaataaactctaacactaaattgccagtgaagtcttggatcggtgaaatgtcttgaaacatctcccgcaaaccctcatcaagaaaccattgataagaagctgtttgaatttcaatcaagtttggcagttcgagcacttcattaattcgcgcatagcttctccgctggcggtgacgtccatactgaattagttgacctgtcaactgattcaccccttaaatctcgcgttatagtatctaaaaaacactgtttataagctgcataaaaaaacctataaacagaggtacccgttcagacaaaaaggcttgtttttgtatcgaatctgcgaagagactatacaaaaccgcaaaaaagctttatagtatgaaaatcaggaaccttttttacgagaacaaaacccattgtactagcataaccaaaaatgaaccgtttcaatcactgagtctttcctcatgaatctggaaacggcaaattaggcagttatacgcattaaatgataatatcatagtcaaaaccagcagtcaattcttttttgcaagaaagacataataacccttctttttccccttgacctcgacattttccgtcccaaatagctcagctaacttttgcttggttgatggcgccccttgctttttttgaatcactacccaacattctccctcaggaattaaccgttcgtacgcttgttcgtaaatgtcgtggacgacgtcctttccagcgcggatcggcggattcgttacaacggcagcataacgggcagaccgctcaaacccagctaagcctcgttcatcgaaatgaatgtcggcatttttcacaccgttcgctttggcgttcttttcggccagttggcaagcgcgttcattgacgtctatcatcacaacccgccttgaagggtccgcttttgccaacgctagcccaatcggcccatacccgcagcctacatcaagtatatcgccatcgagcccaggaaaaacaaatgtttcgatgagaagccgactcccaaaatcgacttcgcctttcgaaaacacaccgcggtctgttgtaaaggaaaacggttcgcctcgcagcgtgaacgtccatgttttctcatcatgggacgaagacggtttgtttgtataataatgctcactcaaggcactcactcctttcatgaatgggaaaagaaggcccgcggacatccgcgggccttcttgtgcgatgctaaacgcctacttcaactcgacgctagcgcctgcttcttcaagcttgcctttgatttcttcggcttcttctttcgcaacgccttctttaattggagccggagcaccgtcaacaagggcttttgcttctttcaagccaaggccagtgatttcgcgaaccactttgataacgccaattttagaagaaccagcagactcaagaacaacatcgaattcagtttgttcagctgcgccaccttctgctgcgccgccagcaactgctacaggcgctgctgctgttacaccaaactcctcttcgattgcttttacaaggtcattaagttcaagaacagtcatttctttaatcgcttcaatgatttggtctttgctcattgtaaatcctcctagtcaattttcattatgaaatgcatttaagcaagcaacaatttacgcgccttgctcttctttttgctcggccaccgcttttgcagcaagtgcaaattggcgaactggcgcttgaaggacgttggcaagcatagaaagaagtccttcgcgtgaaggaagctcagccaaggctttcacttcatccgcagtcgaaatgttcccttcgatgacgcctgttttaattgttaatgcttcgttgtttttcgcaaattcgtttagcacttttgcaggagcaatcacatcatcgacaccaaacgcaatcgcagttgggcctacgagatgctcatccaagccagtaagaccagcttctgctgtcgcacggcgcacaagcgtatttttatatactttgtactcaacgccagcttcacgcaactgtttacgaagctcagtaacttgcgctacattcagtccgcggtaatcaacaattaccgttgatttgctgtcgcgcaattttgccgctacttcagctacaacttgttgtttttgctctaaaactttgctcatcgttacacctcctgtaaaactgttcgcacaccgcttgagtttccatagaaaagccctcgtggcacgaagacacacgagggctttaagctctagtaaaaagagatctattcgctcacctcggcaggatatttaagctatgaagcacctgctgtctacggtatgactattctatttccaactaccaacataacacaagttatattgctagcgcaacttttattttgcaaaagcagtcgtagtcacacggattccaggacccatcgttgaagctactgcaatgtttttcacatatgttccttttgcagctgccggtttcactttgtgaagtgtttctacgattgtttggaagttttccagcaatttaggcgtatcgaatgatactttgccgattggcacatggatgttgcctgatttatcaacacggtactccactttacccgctttgatttcttcaacggcttttgttacatcaaatgtaaccgtgcctgttttcgggtttggcattaggcctttcggtccaagcacccgtccaagtctaccgacttgcgccatcatatcaggagtggcaacgatcacgtcaaaatcaaaccaaccttggttaattttgttgatgaggtcgtcttcgccaacgtaatctgctccagccgcttctgcttcttttgctttttcgcctttcgcaaatactagtacacgttgggttttgcctgttccatgaggaagcacaaccgcgccgcggatttgttggtccgcttttttagggtcaacgccaaggcgaacagcaacttctactgtttcgtcaaacttagcgactgatgttttctttactagttcaagcgcttcttccgcttggtaagccgtatcacggtctacaagctttaaagcgtctgcatatttcttgccttttttagccattttatttcctcctcgtatgtggtgttaacggaaattcctcccactatttgaaaggctgcgactccagcttgggcgcaacctctcacagcaaccaattagtcttcgatcacaatgcccatgctgcgggctgtaccctcaaccatgcgcatagccgcttctacagaagccgcattcagatctggcatttttgtttcagcaatctcacgtactttatcgcgtttaaccgttgcaacttttgtacgattcggctcgccagaacctgagtcaatccctgccgcttttttcaatagcacagcagcaggtggcgttttcgtgatgaatgtaaacgaacggtcttcaaatacagtgatttccactggaataatcaaacctgcttggtcagatgtacgagcgttaaattctttacaaaatcccataatgttcacacctgcttgaccgagagccggtccaactggtggtgccggattggctttacccgcagggatttgtagcttaaccattttaattacctttttagccacgtgacacacctccttaagtccgtgatgtggttaccggatacacaacttgtaccctcccactcaaaaagacggatgcatatgcatccgacaagcatagagaaatctatactaaacattgaaattctatcacctataccgccaagaagcaaggttttttaagaaatcttttcaacttgaccaaactcaagctccactggcgtttcgcgcccgaacatatttacatggactttcagtttccgtttttctacctgtatctcttcgattgtgccgacaaaatcagcaaacggacctgatttcactttaaccgattctttcagttcaaagtctacttcttcttgggcttcaacaacgcccatttgcttcaagatccgctcaacctcatcgggcataagcggcgtcggcttggagcctgctccagccgaaccaacgaaccctgttacccctggtgtattgcggacaacataccatgaatcgtcagtcatgaccatttccactagcacatagcctgggaacactttgcgtgacacttgcttcgtttttccgttttttatttctgtctcttcttcgacaggtacaagcacacgaaaaatatggtcagtcatttccattgactcaacccgcttttcaaggttcgctttcactttgttttcatagccagagtatgtgtgtaccacaaaccagtttttttccattgttcaggacagcgtccttccctcctttaacattcccagagcttcaactttatacgctacagcatccgcagcaacgtcgaaatacctagatcgactagatagaaaaaagcaaccataaaaataagcgttgtgaggacaactaacgtataacgggttaactcttttttagttggccatgttacgcgtttcatttccctgcctacattacgaagaaaagtaactggtcctttgttttcatctgccatgtgatccgtacacctccagcattacacaatatcgaaaagataaacgtcacagctttgcgattttcctgtattatcaacgcgtttctacatgcagtgtatgtccattgcaccgtttgcaaaatttttttaccgtaagccgagtatcgctttttttagcgcttgttaccgagtaattacgggacttgcagatgtcgcaagccaagacacgtttgccactcacgggcacacctccgtacgttgcacacactctttgactctagcacagcactaaacgggtgtcaatgctgggctgaagcgtaatatacaaaggacggaagctaatcgccccgcccttttcatcacaacattacgcttttcagttccacatacctttccagtttacgttttacacgctggagggcattgtctatcgatttgacgtgtcgttttaaatcaatcgatatttcctggtacgttcttccatccaaataaagcatcagcacttgcctctccagctcacttaagatctcgctcatcttcccttcgatgtaagcaaaatcttcttgattaattaaaagcgcttctggatccgttaccttgttgccgcaaatgacatccattaatgtcctgtccgactcctcatcataaagaggcttgtccaacgacacatatgaattgaggggtatgtgcttttgccttgtagctgtttttatcgcggtaataatttgccttgtgatgcacaattctgcgaaagccttaaacgaagaaagcttgtccacattaaagtctcttacagccttatataaaccaatcataccttcttgcacaatgtcttcatgatcagcgccaataagaaaatacgaccgtgctttagcccgaacaaaattgcggtactttccaatcaaatgctctaaagctaacgtattgccagttcggacttctttaatcaaagaatcatcttcccactcttcaaacggactttctttgtacgtcaatgttccttctgctagacttgcacccaaactaatcactcctccgcgatagcatagacataatgttgtgaaaagttatacacattatatagcacttttttctagcaggtcaactattcatttgccgcctcgacgccatctctcaaaaacttcggcaacttcctctgataacgtaattttcgacgactcttgcgctttcttcgttttttgtacgattttgtcgatttcttttgttgccattcccatttcgattgccatctccctagccgacttccgcaaagccccactcccaaaggcgtgagactgctctgccaaatcagaagtggctacgtggatcacccggtcgatccgcttcaatgtctgaacaagcttttcgatccgctcatcggctgtctcgttttttttcgtatagacaatctcgacccgatggtgattatacgatttgccgatcccagcaaccatatgggcgtcaaaaacggcaataacgcggtaacctgtaaatgctgcatattccgccaataagtcaaccagttgatccctagccgcgccaaaatccttttccttcaatttctgcaaagatggccatgccccaatcatgttgtagccgtcaacgagcagaatattctccattgcccgctcactgcccagcccgcttgtggaacacttcgtacatcaacaagcttgccgcaacggacgcattcaatgaagtgacgcgtcctttcatcggaatgctaacgagaaaatcacatttttctttaatcaggcggctaatccctttgccttcactgccaatgacgaggcaaagtggcaagttgtaatcggcttcgcgatagtcaccctctgcagccgcgtccgtgccggcaaaccatagtccttgctttttaagctcgtccattgtccgggccaaattggtgacacgaaccacaggaatgtattcaatcgctcctgtcgatgcttttgcgactgtttgcgtcagcccgaccgaacggcgttttgggatgatgatgccgtgtgctcctacagcgtcggcggtccgcataatggagcctaaattatgaggatcctctatttcgtcaagcacgaggaaaaatggagcttcatgagcagcggctgctttggcaaataatgcatccatgtctgcatattcgtacgcggccacggaggcgacgacgccttggtggttgctatggccgacaagttggtcaagcttacgcttaggggccgtttgcactagcacattttgttcttttgccaattgtgtcagtttcgtcatttgccctttttgcgattggtcgccaatccaaattttatggatggggtgccctgatttaattgcttcgatcactgggtttttgccgacaatgaattcttcttggcggttgtcgcccttcatctgtttttttggttgcgggttggtacgtttgctcatgacgggttcccttctttctgtgcagccattgtcaatgccagcttgagcagctcttccaatcgctcatgtttattcgtcaaatacaaatacccaaggagcgcttcaaaaccagttgcattccggtaagtggccacgtcggtattttttggcgtggtatgggatttggcattccggccccggcggacaatggcttgttcctcttctgttaaaatgccttgttcgcccatttggaaaagaacggcggcctgcgcttttgcagagacatacgtagtcgctgctttgtgcaagcggtttggccgcacggctccttgtttcaatagctcatagcggacacgctgttcatacacagcgtctcccatataagcaagcgcaagcccattcagctggcgccattccctgttcgtactcatcatgacccccgcttccaacgcacgccttgtggcgtatcttctagcacgatgtttttctcttttaagaggtcacgaatttcatcagcacgggcaaagttccgttctttccgggcaacattgcgctcttcaatcaacgcctcaatttcagcatcaagaagctcttcctcttgttgtgtaaagcttacaccaagcacttcgcccaactcggcaaacaactccaaaaaagcatttagcacttttttggacgtttgtgcttcgctcatatagatattggcttctttagcaaggtcaaacaacacactgattgcattggcgctattgaaatcgtcatccatttcttcgataaaacgttgttttgcgccagcaatcttttcgagccactcctcttctgcccccatatcagctgtttccgccaagcggtgctgcaaattggcgactgtatttttcaagcgctctagtccggcttcagctcctttaagaagctcatcactaaagttaattggagtgcgataatgggcagtgagcatgaaaaaccgaacgacttctggcgaatattgttggatgatgtcatgtgcaagcacaaagtttccgagtgatttcgacattttttcgttgtttatgttaacaaatccgttgtgcatccaataattggccaattttttgcctgttaacgcttctgactgagcaatttcgttttcatgatggggaaacgtcaaatccttgccacctgcgtggatgtcaattgtatcccctaaactcttcttaatcatggccgagcactcaatgtgccaaccaggacggccctcgccccacgggctgctccacgaaatttcatttggttttgctgctttccataatacaaaatcgagtgggtcttccttacgctcatctacttctattctagcgccgctttgcaaatcgtcgagcgcttggccagataatttgccatagccgttaaatttgcgtgtgcggaaatagacatcgccccctgcttcatatgcaaatccttttttctccagctcagcaataaaggcaatgatgtcatccatcgtttctgtcacacgagggtgaagatcggcttcctttacattcaaagcacatgtatcggcgtaatacgctttaataaaccgttcggcgacatctgctacttcttcgccaagttcattggcagcgcgtataattttatcgtccacatccgtaaaatttgagacaaaggttacgtcgtagcctcggtaagtcaaataccggcgcaccatgtcgtacacaatgggcggccgggcattgccgatgtgaatgtaattgtacacggtcggtccgcagcaatacatcttaactttgccttcctcaatcggcacgaatggttcttttttatttgtcaaactattaaacagcttaatcatcgtttgtcgtcctttctacttgcttggtatccatactttatgaagccactctagtccaatgtgctttgtttatcggcaagcttgctgtactctgcttttaaacgggcaatttcccgttctaattcagcaatcttgtcagcaacagggtcaggcaaggcatggtggtcaagggaacgggccgagctcacttttattccattttgcacaacaattttcccagggatacctacaaccgtcgaatggggtggcacttcgtttaacacgacagagcctgcccctatccgggctccttcgccgattgtaaatgagccaagcactttagctccactggcaatgagcacgccgtcttttacagttggatggcgcttccccttttctttgccagtgccccctaaagttacgccttggaaaatcgttacattgtctccaatttcgcaagtctcgccaatgacgacgcccatgccgtggtcaataaatagcctttgcccgatctttgcccctggatggatttcaatccctgtcataaagcggacaatttgcgaaagcaggcgcgctaagaaataccatttccgtttccatagaccgtgagcaatccgatgcccccaaacagcgtgcacacccgagtacgtaaaaatgacttctagccgactacgtgcagcaggatcttgttcaaagacgacatcaatatcattcaacaatgtacgagcaagccccatctgatccccctccttcatcgcaataaaaaacgcccctgcacctcccaacgaaggtacagaggcgcttactgcacggttccactctgcttttttcagcttattgctgaatctctaatcgcttgtaacggagcgacccgcttttccctacgtgttcttgttcaagaaaagactcatgggggcaaaccatgcgcgtctcttacaggcggctttcagccgacggccgccctctctgcgaaagttcttcgctggcattcccattcaacgttttgtatctattcttattaaatattaaatagcagcttgcaagcgtgctttcacaacgctttttcctaaaagctcgatcgtatcgccaagctctgggccatgtgtttgaccgctcaccgctgcgcgaattggcataaacaattttttccctttttgcccagtcgctttttgcgttgctttaatcgcttttttgatgtcagcggcaaaaaatccttctagcgattctagctcttttgcaaattggcttagcacttcaggaacttgttcttctgccagcacggttttcgcttcttctgtataatcgacttcttctttgaagaacatttccgtcagttcgacgatttcagccccgtaatgcatttgctcctggtataagccaattaaacggcgcgcccattcccgcttgccttcatccaactgttctggcagtttaccgctggcaactaagtggggcaacgctaagtcgacaacagtatccaaatcagcgtttttcatgtattgattgttcatccaggcgagcttatctgtgtcaaaaatagccggcgcttttgaaacgcgatcgagtgtaaattgttcgcatagttcttcaagcgaaaagatttcttcctcgccgactggcgaccaaccaagcaatgctaggaaattgacaattgcttcaggcatatagcccaatgatttatactgctcgacaaattggataatcgattcatcacgcttactcatcttctgcctgtctgggtttaaaatcaaggaagcgtgggcaaattttggcacatcccatccaaatgcctcgtagagtaaaatttgccgaggcgtattggaaagatgctcttccccacggatcacatgggaaatgttcatcaaatggtcatcgacgacaacggcaaagttgtacatcggtacaccatctttacgtgcaatcacgaaatcgccaattccgtctgtctcaaaagacacctcgccacgaacggcatcatgaaatgaaacagtttgcccctcaggcactcggaaacgaacaacaggctgaatgcccttcgcctcgtaagctgcccgttgttccgctgttaagtcgcggtcacggccgctgtattttggcatttcgccccgcgctttttgcgcctcgcgctctgcttctaactcttcttccgtcatgtaacagtagtatgcttttttctcatccaacagctgttgaatatagttcttataaatatcaacgcgttccattgagcggtatgggccatatttgccggcctctgtgtcaatgctttcatcccactctaggccaagccatcttaaactgtccattaatttttcagttgctgtatccacattccgtgcttggtctgtatcttcaatccgcagcacaaacgcgccgcctgctgatttagcaaacaagtaattaaacagcgccgaccgcgctccgcctatatgcagatgccccgtaggactaggggcaaaccggacccgtatatctttcgtcatcacgacgcactcctttggctaccttattctgaatcatcatagcacgttccgcggtaaaaacaaaggctactctgctttctgcagcaagataactgcctgcgcagctatcccctcctcacgacctacaaaccctagcgtttccgtcgtcgttgctttaacgctaacgttggccacgtctgtttccagcaattcagcaatttgtttccgcatcgcttcaatataaggcgctagctttggcttttgggccatcaccgtacaatcaacattccctaacgtataaccggcgttttttacaagctgccaagcttggctcaataggtgtttagagtcagcatccttgaacgcttcatccgtatctgggaaatgtttccccaaatcgcctgctccaatcgcgccaagagctgcatcggtaattgtatgcaaaaggacatcagcgtctgaatggccgagaagccccttcggatggggaatatgaacccctcctaataatagcggcctgccttcagcgagctggtgtacatcaaatccttgtccaatccgaatcataattggttctcccttttctttaatatcgtttcagcaaataacaggtcttcctcagtcgttaatttaatatttaagtaatcgctctcgacaatggtgacgcgtttgtccaatctttctacaagacttgcatcgtcggtcccgagaaacccgtgttttttagcgtcttcgtgtgcggccaagacgagctcatactggaaagcttgtggtgtttgcgcagcccagaggtttttccgttcaactgtacgtgcaacgctgtttttgttggcaagcttgactgtatctttgaccggtacagcagcaatcgcagccccgctttgagccgcttcatcggccagctttgtcaaaataggtttagcgacaaacggccgggcaccatcgtgaataaggacgatttctgcctcctccattccttttaaccctgcataaacgctgtcttgccgttcagctcctccatttacaagcccttttactttgcctatctgatactctgcaacaagcttctccattatctgcctttccggttcactcactacaagccagatcgctttacaagcctcatcttcttcaaacagcctgagtgaatggacgatcagaggaatgccgtttaaatcgattaactgtttattcatacctgctttcattcgttttccttgtccggccgctaggacaattgcagcgtactccatctatgttctccctttttttcgttatatgcctagtttaccatgggtacgccagtatgcctaaaaaaacgcccctttagaaacaagtagcgtaaaacaggcaaacagcctacaccccaaggggcataggcttcagattatagaactgaattgatccttcactgcaagcgcatatcaagcagtgcatgatcgtgcagcgctctactttcctatagtgctttttcaagcgatttaggtttggcaaaaatcatccgccctgcacttgtttgcaggacacttgtcaccgtgacatcaatttgcttattcatataatcacggcccccttcaacgacgatcatcgtgccatcatctaagtaagcaattccttgatggttttccttcccatccttaatgacattcacattaagaacctcacctggcaaaacaactggcttgaccgcatttgccaaatcgttgatgtttagcacttttagaccttgcaattcacacactttgtttaaattaaagtcgttggttacaacaattccagaagtgatttttgccaatttgactagcttgctgtccacttcttgaatgtcttcaaaatcgccctcgtatatttcaacattgacaggcaattctttttgtattttatttagtatgtcaaggcctctacggccacgatttcgtttcaatgcatcagaagaatcagcaatatgctgtaattcatctaacacgaattcagggatgacaagcgtgccttctagaaagccggtttggcaaatatcagcaatccgcccatcaataatgacgctcgtatcaagaattttcatttgtttgccgccgagattagagtcagtctcttctttctttttgtcacgctctttatctcttggcactcgcatagagacaactaattgaaacagctcatctcgttttttgaagccgatttggaagcctagataaccgagaagaatcgtaataaacataggcaaaatattgctaataaccggcaaatccaatccacttaacggcgtcccgagaaaataaccggccacaagtccgaccgtcaagcccattgatccagacaacacatcagcaagcggcgctttgacaattgtttcctcgacaacccgaaagaaattaacaataagatcgacaataaacaaggacagaccatataagagcaaagcaccgagtactgcccctgtataaggactagccaaccacgccggcacttctagcgctattactgcaataaattcagggacaaacaagaatcctaatgttcctcccgctaataaaaagaaaatccgaacaatccaattaagcattcactcttacacctccttttagctattatagacaagtttacaactctcaaacctagtagtctggatttcccataaaaaaacacgagatcacgtaaaaaatatttttactgaatattaagaaacgtacccttaaggagtgaaacactccttgtcaaatgtggcgatcgacgaaaagttgctcttgaatgcggtttaatccatccttaatcattttggctctcgcctcgccgatgccgtcgacttcatcaagctggtcttccgtcgcaaccattacgcttgagagatgaccgtattcgtcaatgacattttcaatgatttgtgatggcagccgtgggatgcggtgcaaaattcggtaaccacggggtgaggctggttgttctagaaaattgcttgttcttgaatagccaagcgcttttataatcgcctgctcgtcgagcaagtcttcgtttaacaacgtcgtgagttcctttaatgttttcttgacgtcttgcgtccgctctttggcgtaatcctttagcaaatacagagcttcctgttctgtattagaaacaagctcttttagctgcatcgtaattaagcggccttcgtcccctagctcaagaataaaattttggatctcttgtttaatccgcaacaccatttgcacccggtgaatgacttgaatcacatcactgtaagtaacaagctgttcaaattcaagcgctcctaaatttgtaatgccttggtctaataccgctttatatttttcaagcgtttggatcgcttgattggctttcgtcaaaatgacgccaatgtcttttagagcgtaacgatattccccttggtagagagtgatgacgtttcgccgctgggaaatggaaatcgtcaaattgcctgtttgtttagcaacccgttcagcagaacggtgacgaatccctgtttcgctcgaacttatattattgttcggcaccaattgcgtattggcatacaaaatacgttttccgtcttcactcaaaataatggcaccgtccattttagctagctcatacaaataagccggtgaaaaatcactattaataaagaaaccgccgtccacaatgttcatcatttcgctgttgtagccaaggacgatcagccctcctgttttcgcgcggagtacattgtcaatcccagctctaagcggcgtgcctggcgctactaactttaataagttttggataaatgcagttcgattccgttcttccatccatcttacctccctaaaacaacttcaatcgcttgttcaagtgtctgcacgccaatcacttcaatgcccgctggcgcagtccagccgcctttgtttttttcaggtatgatgacacgtttaaagcctagtttcgcggcttcattgacgcgttggtcgattctagagacacggcggatttcccccgtcaaccctacttcgccaatcgctacgtccatcggttctgttggctggtctcggaaacttgaagcaatgctaagagcaatcgccaaatcgatcgccggttcatctaactttacgcctccagctacttttaaataagcatcttggttttgcaagagcatgcctgcccgcttttccaagacagccattaaaagggagacacggttatggtcaagccccgttgccattctccgaggattgccaaatcccataggcgaaattagcgcttgtaattctacgagaacaggccttgtgccctccatggaagcgacaacgactgagccagccgctccttgcgaacgttcctccaaaaagatctctgacgggtttttcacttcctctaagccaagctgtttcatttcaaaaatgcccatttcattggtggagccaaatcggtttttcactgcacgcaaaatgcggtaactgtgatgccgctctccttcaaaatagagaacagagtcgaccatatgctcgagcagctttggaccggcaatagaaccttgctttgtaacatggccgacaataaatattgccactccttttgtttttgcgacacgcataaacgcagccgtgcattctcgcacttgggcaacgcttcccggagcagacgtaatctcgtcctggtaaacggtttggatcgaatcaataattaccaaagacggctggacttcatctatagccccttcaattaaagcaatgtctgtttctgctaatacgtatagctgatctgatgctagttcaagacggtcagcccttaacttcgtttgtttaactgattcttctccagaaatatagagtactcgttcgtttacgtttgccagcttcgctgacaattgtaagagcaatgttgattttccgatacccggatcgccaccaactaaaacaagtgatcctggaacgattcccccgccaaggacacggtccagttctgccattgtcgtgcttacacgcggttccttttctccttgcaccgccgtaatcggttgcggtttttgccgtgtaccactggaagttacatagctacggtttttttgtttttcaaggatgtttatttcttccaccattgtgttccagctttggcaaccagggcatttgcccatccattttgctgattcatagccacactcttggcagacgaacttcgttttttgtttcgccatgtatcccattcccccgtttggattcactacatgtagtgtaccaaaaagcaaatagaaacgtaagaaaagctccatgaaatcgtgtcactgagtgcaaaaaaaacaaagtgaaataacataggagtaaatgaacaagaggtgcagattgtctgcataagttgaggcgaaaaacaacgaggcgagggcgccaacgttcttttttaaaagaaccggagggtgtgcctccggttcttcacatcaggaaatgcttgatttttcttttccttctaccattagcttgccatctttcacatagataaccgctttttggcctttgacaattgtgccttttaacagttcctctgacaaacggtcttctacttctttttgcaaagcccggcgtaatgggcgggccccgtattctggatcaaaaccgatatcagtgattttatcttttgcttcttctgtcagctcaaaatctatgccttgctctgaaagtcgccctttcagttggtcggccatctttgtaataattttgcgcacatgctttttctcaagagagtggaacacaatgatttcgtctatacggtttaaaaattcagggcggaagctgtttttcagttcagacatgacacggtctttcatgtctttgtactcctgcccttccgattcaattgtaaagccgagatacttattgcgtttgagctgggaggctcccacattggatgtcatgatgacagctgtattacggaaatcaacagtccgtccttttgaatccgttaaacgcccatcttccaatacttgcaaaagcaaattgaatacatcggggtgcgctttttcgatttcatcaagcaatataacagagtaaggctttctacggattttttccgttaattgcccaccctcttcatggccaacataacctggaggcgaaccaactagccggcttgttgcgtgtttttccatatactcagacatgtcaatccgtatgacagcatcttcatcaccaaataacgtttctgctacagcccgggcaagctcggttttaccaacacccgttggacccaggaaaataaatgatcctattggccgctttggatcttttaatccagcgcgagcacggcgaatcgctttcgaaatggatttaacagcttcttcttggccaacgacacgctcatggagaatctcttccattttcaacaaacgttccgtttcctcttccgctagtttggaaaccggaattcctgtccagctagaaacaacttgggcgatatcctcaaccaatacttctgtgttttcttgaccttgctttttcttccactcatttttcatttcttccagctcttcacgcaaccgttgttcggtatcacgtaaggaagcggccttttcaaattcttggctttggacagaagcgtctttttcttttcttgtttcttcaagcttcgcctctagctcttttaaatttggcggagccgtgtaagaacggaggcggacttttgaagctgcttcatcaattaagtcaatcgctttatctggcaaaaaccggtccgaaatataacggtcggacaactttactgcttcttccaccgcctcgtccgtaatggtcactcggtgatgggcttcatagcgatcacgcaaaccataaaggatttggatcgattcatcaatcgttggctcgtcaacttgaatgggttggaaccggcgttccaatgccgcgtctttttcaatatacttgcggtactcatctagtgtcgtcgcgccaatacattgaagttcccctctagccaaagacggtttcaaaatattagaagcatcaatggctccttcagcgcctcctgcgccaattaatgtatgcaattcgtcaataaacagaatcacgttgcctgcttggcgaatttcgtccatcacttttttcagccgatcttcgaattcgccgcggtattttgttccagcgacaacagttcccatgtcgagtgtcatcactcgcttattgcgcaatgtttctgggacttcattggcaacaatgctttgggccagcccttcggcaattgccgtttttccgacaccgggctctccaattaatactgggttgtttttcgtacggcggctaagcacttgaataactcgctctatttcacggctacgtccaataaccggatcaagcgtttcctccctagcaatcgctgttaaatcacgggcaaggctatccaatgtcggcgtattggcattagttgccgcaccgtttgattgtgacgagcttcctccttcattgcttccaagcaactgcaatacttgttgtctcgctttatttaagctgacccctaaattattaaggactcgtgctgctacgccttctccttcgcggatgaggccaagcaatatatgttcggttccaacgtatgaatggccaagctttcttgcttcatccatagacagctcaattactttctttgctcttggcgtataatgaggcgtgctatgaatgcttttttgcccttcttgcccttttcccactagggtttctacttctttttgcaatttttcggaaccaagtccaagctgttgcaaagctttcgctgcaattccttcaccctcacggattagtccgagcaatatatgttcagtgccaatattatggtggcttaaacgaattgcctcttcttgcgatagcgctaatactttctgggctcgttcagtaaaccgtccaaaaatcattccatccacctccgaattattcaatcagctgtttcatgttctagttttaagcgttcgcgaattaaagctgcccgtctctcatcgcgttgctcgggagtgagaacggttttcgcgtattgttgcaggaagcctggttgtgtcaaaatcattagttcatctagaattttccctgccgtgttttcaataaaacctagatcgattcctaagcgcacatcagacaaccttcttgtcgcttctttggaatcaataatatagctgttcgctaaaattccgtaagacctaaaaacacggtctttaagttctaactttgagtgctgtaaaagcgaatctcgcgcaacacgctcttgccgtatcaattgcttcactacgccttgtaaatcatcaacaatatcctgttccgtttttccaagcgttatttgattagaaatttgaaataggttacctaaagcttcgctgccttccccataaattcctcttacaactaagcccaattggttaattgccggcaaaattcgttgcagctgccgggtcatcgctaatgcaggtagatgaatcattacggaagcacgcatgcccgttcccacattcgttgggcagctagtcaaataaccatactggctgtcataggcataagttaaatgcgattcaacccaatcgtctaccgcattagcggcctgtaaacaattttcaagctcaaatccagcgcttaaactttggatgcgaatatggtcctcttcattaatcataatgctaagtgattcatctccgcttaaaagcaccatgccatactttgattgctcagccaaatgaggactaatcaaatgcttttcgacaagcatccgtttatcgtttgtccgcatatcttccatagccaacatttcagctttgcccaaggcctcaccttgcgttccccctaaggcatcttttacatgttttgcaacggcgtatgcttcttctttagaagagagcatcggaaatgtaaaagcactcatatttcttgctaaccttattcggctactaagcacaatatccgcatccgaaccatcttttttcatccaagggctaatggcatttttcagaaaacgatccaagctcacagctcctattcgcctccttccatttgctctttcaattttttaatttcatcacgcaattcggcggctttttcaaattcttctttttgaatatgactatccaatagcgccttaagctctaatagccgtttttcaattttaagggacttgccaatcctttttggaatttttcctttgtgagtgtcattgccagcatgcactcttttaaacaccgaacttaattgagggccaaacgctttgtagcaatgggcgcagccaaaacgaccaatatgaagaaatttttcgtaactcatcccgcaattcgggcacctttgcttttgttcagctgtttccctcgtttgttcggctcccatgttaaacaagcccgagaatagatggtgtatggaaaagctatcggtccctggaattgattcgcctttttcacgtgcacactgatcacataagtgcatttcatgcttttggccatttataattttagtaaaatgaagagttgcttgccgttctttacattcttggcagaccatttttcacccctccttctacgtttcgttttctttgtatttaagcgtctcaatcattgccttcagcacatttgctctaatttcatccctatgggcaactgtcgatttataatgggcacgatctaatgcgctcatcatcaaattagcttcccgtcttgtaatggcttcctcttcatacaaacgaaatacaatgttttgcgccgtttgctggtctattttatttccgataagctgacacatgtgctcaaataaagcaatgtcttcatgggattcaactttcgttatacgaatgtagcctccgccgcctcttttgctttcgacaatatagcctttttccaaagtaaagcgggtgctgatgacgtaattgatttgagacgggacacattgaaactgcttagccaactcactacgtttaatttccaatagttcatttccgcttcgcattaatgttgtctttaagtattgttcaatcaaatcactaatattgcgcattccaccaacccctttccgccattgactttgactatatttgacttttattggtttaattatagctagttttataaaaaacttcaaccagtaactcttttttattatcgccaaggattggggttctagacgtggttccgtctatttataggatattttcttccgtttttaatggtgcatcttttggcccttgtcctaagggaatttttgcattgctccttttaaatgagcttatctccatatactcctaataagcatttaactctgcttcttcgaagcagtcctcttttgcttcctgcatataacaaaaaaagacacctattcaggtgtctttagtatttgcccggcaacgtcctactctcgcgggaggaagcctccaactaccatcggcgcaaaagagcttaacggccgtgttcggcatgggaacgggtgtgacctctttgccattgtcaccggactctacttcgatcaccctctcaggtcggctacgcatcgttgccttggtaagccgttaccttaccaactagctaatgcgccgcgggcccatcccctagtgatagccgaagccatctttcaccctctctccaggtggagaaagggattatccggtattagctccggtttcccggagttatcccagtctaaggggcaggttgcccacgtgttactcacccgtccgccgctaacgtccgggagcaagctcccttctgtccgctcgacttgcatgtattaggcacgccgccagcgttcgtcctgagccaggatcaaactctccgttaaaaagtttgacttgctcattgcacaaccgaagttgtggctcactatgattgacgagataccttgtatctcttttacgcttggcttttgttcagttttcaaaggactcggttgccgtttcagaggcaacttaattaatataacattattgagtgtgaatgtcaacactttttttggtggagcctagcgggatcgaaccgctgacctcctgcgtgcaaagcaggcgctctcccagctgagctaaggccccatagtaatggtcgggaagacaggatttgaacctgcgaccccttggtcccaaaccaagtgctctgccaagctgagctacttcccgtaaatggcgcgcccgagaggattcgaacctctaaccgcttgattcgtagtcaagtactctatccagttgagctacgggcgcaattaaattgttggcaatatgccgagagccggacttgaaccggcacggtagtcacctaccgcaggattttaagtcctgtgtgtctgccaattccaccatcccggcacgggatgcaaaaacaaaaagcggaagacgggattcgaacccgcgacccccaccttggcaaggtgatattctaccactgaactacttccgcaatttataaattttgtaagtgcgggtgaagggacttgaacccccacgtcataaagacactagatcctaagtctagcgcgtctgccaattccgccacacccgcaaaacaatattatggtgagccatgaaggactcgaaccttcgaccctctgattaaaagtcagatgctctaccaactgagctaatggctctgacttaacttggattaatggtgccggccagaggacttgaacccccaacctactgattacaagtcagttgctctaccaattgagctagaccggcataattgtaaaaataacgttgatttttgttgaaaaatatctccgtttactaaaataacgttttacacttaattcgtcaagtagctttttaaagcctgtcttaaaaatagaatcttgagaatacagagcaaagcatggtggaggatgacgggatcgaaccgccgaccctctgcttgtaaggcagatgctctcccagctgagctaatcctccattgcaaataaaatattgcccggcaacgtcctactctcgcgggaggaagcctccaactaccatcggcgcaaaagagcttaacggccgtgttcggcatgggaacgggtgtgacctctttgccattgtcaccggactctacttcnnnnnnnnnnnnnnnnnnnnnnnnnnnnnnnnnnnnnnnnnnnnnnnnnnnnnnnnnnnnnnnnnnnnnnnnnnnnnnnnnnnnnnnnnnnnnnnnnnnnttcggatttcttcgtccagttcgtgtctctcagtcggtcacgtacgtttgggtacgctcccttcttcgagcactcctgtcctcgaactcctcgcttctcttcgtagttctcagataagcagcgaatcgcttcgtctgcactaaagggtatggaaagaatcggtgattctttcaaaactaaatccgaaataaactcaatgtcaagaatgtgtataggataagtcctcgaccgattagtatcagtccgctccacgtgtcgccacgcttccacttctgacctatcaacctcatcatctctaaggggtcttactggcttacgnnnnnnnnnnnnnnnnnnnnnnnnnnnnnnnnnnnnnnnnnnnnnnnnnnnnnnnnnnnnnnnnnnnnnnnnnnnnnnnnnnnnnnnnnnnnnnnnnnnnacaggacgtcgcgaccttaaccgaagatccttagcttcattgcacaaccgaagttgtggctcactatgattgacgagataccttgtatctcttttacgcttggcttttgttcagttttcaaaggacttggttgccatttcagcaactttttcattgtagcaaaaacagcgacgtttgtcaataaaatcttttgtttttgcttcgtttggtgaacatcgcatcttagcgacaagaaataatataccactataaaacaaaaagcgcaatacttttttaaaagattttcttatctgtttgaacaggcagttggctgacctgtagaaaacatcagatcagccaaccattgcttattcgccttgctcgcggttacgcatttgcgggaagagaatgacgtcccggatggaaggtgaatttgtcaacaacatcacaagtctatcaatgccaataccgagaccgcctgttggaggcatgccgtattcaagcgcttcaataaaatcttcatccattcggtgggcctcatcgtcaccttgctcacgttcaattaattgtgcttcaaagcgttttctctggtcaatcggatcattaagttcagagaatgcattggcatgttcacgcccaacaataaacagctcaaagcgatcagtaaagcgcgggtcttcctcatttttctttgcaagcggggagatcgccaaaggatggccatatacaaatgtaggctgaataagcgtttcttctataaagtgctcaaaaaactcgtttacaacatggccaaatgtcattgtttcttttactggcactccatgttcttttgcaagtgcccgcgcttctccatcgctcatctgctgccaaaaatcgacgccagtcttttctttaatcgcatcaaccatatggactcgcttccaactaggtgccagttcaacggtgtgttctccgtactggaccgtggtcgtgcctaagacttccttagcaatgtgcgcgattacgccttctgtcagttccataatgtcatggtaatcagcatacgcttcataaagttcaatcattgtaaattctgggttatggcgagttgatatcccttcatttcggaacacacggcctatttcgtatactttttccaagccgccaacgatcaaacgctttaaatgaagctcaatcgcaatacgcatgtataattccatatcgagcgtattatggtgagtgacaaatggcctagcagaagctccaccagggatgctatgcatcatcggcgtttccacttcaagaaagcctttttcatctaaataacggcgcatgacttgaatgattttacttcttgttataaacgcggttcttgattcaggactcgtaattagatcaagataacgctggcggtaacgttgctcaacgtcttttaaaccgtgatatttgtctggcaacggacgcaatgatttccctagtatcaccagctccgtcactttcacagacatttctcctaccttcgtcttaaatggacgcccgccgacaccaaccatgtcgccaatatctaatgatttgaataaaccatacgcttcttcccctacggcatcctgacgaacgtatatttgaatctgccctcctatatcttgaatgtgggcaaacccggcctttcctttgccgcgttttgtcattaatcgccctgcaaggacgacatgatcgtctttttcttcaagctcttctttcgtaaacgcagcaaattgctcaatcacttcatttgatgtatgcgtccgttcaaactttccgccaaatgggttaatcccttcatcatacaattgatttaacttgtctcggcgcacggcaagcaaatcatgcatttccaatccttccgtcatcgctctcaaccccttgtcctcattcactgaaaaagggtagaccgagtaaaccggtcaaaccctttgccgttcattactacgaacagtgtactatatcgcagaactctccgccagttcgcgcccctctaagaaatcaacgtattcataaagggcttttactacatcatcccttgtttcaaattggttgactttgtcgcggattttcgctttgccgcgcaatcctttaatataccaagctgtatgtttacgcatctcgcgcactgccacacgctcgccttttaaagcaaccaaacgatccaaatgaattaaacaaacttcaattttctcgcgtggagtcggttctggaggaagagtaccattctcaagatattggattgtacggtacaacatccacgggtttccgagagctgcacggccaatcatcacaccatcaacgccatattcgtcgagcatccgcttggcgtcttgcggtgtagccacatcaccgttgcctataaccggaatgttcactgcctttttcacatcgccaattatattccaatcagccacaccctcgtacatctgaacgcgcgtgcgaccatgtacggctactgcacttccgcccgctcgttcaactgcacgtgcattctcgatggcataaatatggtcttcatcccagccaatccgcattttgacagttaccggctttttgactgcatcgacaacggcagcgaccatttcgtaaatttttttagggtcaagaagccagcgggctcctgcatcacactttgtaattttcggcactggacaacccatgttaatgtcgatgatatcggcattggtgttttggtctacgaatcgcgctgcttctactagtgtatctttttctccaccaaaaatttgcaaactaagcggcttttcccgctcatctacgtaaagcatttgtaacgatttttcgtttttatgcaagatggctttgtcactaaccatttccgcgcaaactaggccggcgccaaattctttcgcaattaagcgaaacgccgggttgcatactcctgccataggcgcgagtacgacttggtttttcatttctatatcgcctattttcagcataggtcacacctccatttgctctcctttgtatcatctccgctttggagatgtataaacccttcaggaccaatgatcctgctatattcacctaaattcaagatacgcttacagcaacagcgtttagctttctgtatggacgtattggtcaacgccgctccaatctctccaccatgttacaccagcttgcatcgccgaagctaattcagccactgtttgcttacaggtttcgctgtatacatcaggcgctatttctgcaagcggaacgagcacaaacgcgcgctcccacattcgtggatgggggatttgcagctcacccgtctctatattttcatgatcaaacaacaaaatgtcaagatctagtgtacgagggccgaagcggataaggcgttttcgaccaagtttcctctctattgcttgtgttgctgcaagcaatgaaaacgggctaagggttgtttcgacttcagcaaccatatttaaaaatggcccttggtccgtaaagccaacaggctccgtttcatatatggaagaagcttgaatgacttgaatcgaggcatcggcgtcaagcagcttcattgcttcctgcaaataattttcccggtctcctacattcgaacctaacgcaatataagccttatgcatggcgtgacctcgttagctcgactgcaaccgagtcgtaatgccctgcaatgggcggattaggcttgatcactttcactgtacaggtttgcagttggtcatacgcctgtaaaagctcggcgctaatccgttcagccactgcttctaccagcttgtacggttttccttcaacaatcgttttaacacgctcatgtacgtcgccgtaatcaatggatgcctgcaaatcatcatggcgtgcagcatgccttaaatcgagctcaagcactaaatcgacgataaagtgttggcccaactttgtttcttctgaatagacgccatggtatccgtaaaaagacagttgatttaaaaagattttatccaacatcatcactccttttcagcatggcgtccatcataatggccatgcgtgccatttccttcacatcatggacacgaatgatttgacagcctttcgcgattcctaaacaaatggtcgcgccagtgccctctatacgttcctcaaccggcaaattcaaggttttggcaattaaagattttcttgaagtaccaagcaacactggcaagcccatttcgacaatttggtctagttcacgaataacctccaaattttgttcatacgttttcgcaaagccgacccctggatcaagccaaatttgctgtttttgtacacctgccctgaggcagatgtcaatgctttcttgcaaatcagctttcacatcttccatgaacgattgataattcatattctcgcggttgtgcatcagtatgattggaacagcaaggttggcagcaactgtcgccatttccggatcagcttttgctccccaaacatcgttaataatagcagcgccagcatgtactgctgcttttgccgttttagctttgtacgtgtcaatggaaatcgggacgtccatccgcgctgatattgcttcaatgacgggaataacccgttccatttcttcttctgctggcacaggggtgtaccctggcctcgttgattctccgccaatatcaattaagtcagcgccagctttcacaagctcatgggcacggtcaaccgccgcgttaagacgattgtagcggcccccatctgaaaaagagtcaggcgttacgtttaagatgcccatcacttttgttcgtgctcccctattgacttgaagagaaaatcgcttgctcatgttgttttgcttcctccattcgctgcatgtgtgtagttggcagcaatgaccggcacaagcgagccgatttccagctcccggccgtccaatcttgtaataggcacgacgccttggattgaattcgtgagaaaaagggcatccgcttcatgaagagcttccgctttaaataagcctacgcgcacttcatgccctgccctttgtaattgtttgatcacaaagcttctcgttactccgcctaagatgcccgtttctaacgagggtgtgaagacaacatcgccttttatccaaaatagattggagacaatgccttctgctacatgcccttcttttgttaaaaaaatgccttcagcatgaggggactggtttagctcttgcttggcgagaacattatttaaatagtgatgtgattttagccgcacgcccccttcaggcgtgttccgaacagtgtgtaaaacaacagcttctttgtgaagcggctttttaggcaatggcttcatatacacgatttccgttggcgcctcatagcgatctggaaacaagccaatctcacgcatgccagctgatacattccagcggacatatccttcctcgagctgatttgcttcaagcaatgtatagacggtttcaagcgcccgttcttttgtcaatgcgtaggcaatgccgactgattctaagccttttaaaagacggtcaatatgcgcttcgagcaaaaacaccccgtttttatgggcagcaaaagtctcaaacagaccaatgccgtataaaaaaccgtggtcaaacgcagaaatggtcgcctgctcttttgcaacaacagctccgtttatactgaggaacatgccgtgccaccttgataagaatcaataaattgacgcaacaacgttttcccctctttcgtcataatcgattcgggatggaattggacgccttcaatcgccaactccttatggcgaatcgccatcacttccccttccgttgtttccgcactaatttcaaaacatccaggcaacgtttctcgtttaacaataagcgaatggtaacgcgtgacgacaagcggactcggaagaccagcaaatattgtttttccatcatgctggacattcgatgttttcccgtgcatcagccgctccgcctgaacaacatggccgccaaaagcctgggcaatcgcctggtgtcctaggcatacgccaaaaatcggcactttccctgcaaaagcacgaatcgcctctaagctgattcctgcttcgtttgggctacatggccctggagaaatcatgatacaatcaggatttaagtcggctatttccgtaatcgttatagcatcattccgtttgacgaccaactcttgtcccatttcgcctaaatactgaaccaaattgtacgtaaatgaatcataattgtcgatcattaaaatcatctcttgctcctcctaagctctgctcgtttttgttaaaactctctgctctgctaattcaagcgcacgccatagcgcctgcgcctttttcattgattctttgtactcgttttcggcattggaatcaatcactattccagcgcctgcctggacatgggcgttcccatcctgacacagcatcgtgcgaatgactatgtttagttccatgtcgccattaaaaccaatccaaccaatggaccctgtatataggccgcggcgaacgggctccaactcttcaatgatctccattgtccttacttttggcgctcccgttatcgtcccccctgggaacgttgcccgaatgcaatcgtatagcgtcaaaccctctgccaattgtccctttacactggaaacaaggtgcataacatgtgagtaccgttcaaccactaataaatcgtcaacggctaccgtgccgtattggctcaccctgccaagatcgttacgttccagatcaacgagcattacgtgctcagcccgctctttttcattgcttaaaagttctgcttcaagcaaggcatcttcttcctcattgacacctcttgagcgtgttccagctattggccttgtttccagttcattgccccgctttttaattaacaattcgggcgaggcgctaacaatttgtgtttttggactatggatataacccatatacggtgatggattaagctgccttagctctttatacacactaaaagggtctacttgaaggctccgggtctggcgaacggacaaattgacttgaaatacatcgccgcttcgaatgtagtcctgcaccctttcgacagcacgaacaaactgctctttcgtaaatgtcgcttctttgcgtgaacgggaagtaaatggatttctacttggtgtcggagcagactctgcttgcagccaccgctgttcaagcagcgccactttctcctgcagcaattggctatcgcttccattggcgcatagccacaactgctcttcctcatggtcgtacacagctacttcctcaaaaacgagaaaatagacttcaggcagttgcaaatcatcaaccgcggtttcctttaacgactcaatttctcggacaacatcataagacaagtatccaatcgccccgccttgcattggtgggcctgttaacgtgtcttctgtttggtagggggcaagtaccgtttctaacgaagataacagcgggcctttaaaaagatgtttgccgttttggtcgctaaccattaatgtgtggcccttgccttcgatcacagcaacaggcgttaagccgattatgctataccggcctgtctgtccactttccaacagtacatgatggggctcgtctttcgccaatgcggaaaatcggtgaaaccactcgttttgcggcattgcgatttttttatttattgatgtacgaatggcagaccctttttgcgccatagactcactccgtctctaaagcatatgtgcctattctactaaacaatttctaagaagaaaagcagcctcttcgaaaagagactgctacagacggtagacaggcgcatcgtttgccttgttcctatcttttaaaccctcatgtcgagtggccgacaaacaaagctggtaaattatgaatgggtcgtttcttcctcaaattggtacagcggcgtgctcaagtaccgttctccgtttgaaggaataatcgcaaccacttttttacctggccctagctctttcgcaagttctaacgctccataaatggctgcccctgaggaaataccgcctaaaatgccttcttcccttgccgcacgacgtgcatattcaaacgcttgttcagtcgatacttgtaaaaccgaatcatacacatttgtatttaagatgcctggcacaaaacctgggccaatgccttgcagtttatgggggccgggcttgccacctgacagcacaggagagtctttcggctcaatcgcgacaattttcaattctggaaaatgctcttttaataggccgcctgctccagttatcgtgccgcctgtgccgatgccggcgacaaagccgtcaagctgcccatcgacttgcttaagcagttctttgccagtcgtttcacggtggattttcggattggcgctgttttcaaattgctgcggcataaaatgcccgtcttgtttagctaactctgtcgcttttcggattgccccgcccatgccttctggacctggggtcaacacaagctcagctccgtaagcgcgcagcaagttacgccgctccatactcatcgtttcaggcataaccagttttgttttatagcctttggccgctgcaaccatagcgaggccaatgcccgtgttgccacttgttggttcaacaatggtcgctcctggctttagttctccggattcttcagctgcattcaccatcgccagtgcaatccgatcttttacgctgcttcctggattttggtattcaagctttaagtacacgtctgcatgttcagcagtcgccaggcggtttaattttacaagcggggtattgccgatcaattccgtaatgttgtttacaacggtcacaatcaaacgcctcctcaatccctagtatcttcattggttttataaaaataggatagcaaacattttcagataagtcaatcagacatctctgcttttcacgcttttcgcctgcgccaatgaagcatggttttgtctaccgtttgctctcggcttcttctaacaacgcttttagttctgcttctgtgaatgaatacgattcattgcagaaatggcacaccgtttcagcgccaccatcctctgtaatcatcgcttcaatctccttcgtcccaaggctaataatcgcgttgccgattctctccttcgagcacgagcattcgaagaaaacaggttttgtttcaaggaacttgacattttcttctccaagaaggccattaattatttcttcaggtgttttgccctgttccaccagcttcgaaataggcggcgtttccccgatccgtttttcaatttctgtaatggttgcttccttcgctccaggcagtagttggatgacaaaccctcccgctgcaaggacgctttcatcaggattgacaaggacaccgacaccaacagaggaaggtgtttgctctgagttggcaaagtagtatgtgaagtcatcgcctatttcgcctgaaacaatcggcacgcttcctgtaaatggttctttcataccgaggtcttttacaaccgaaagtgttccttcagtcccgaccactctcgccacatcgagcttgcctttgctgtttaactctgggctgacatgagggttggtcactgtcccacgcgttgcccctgatgcatgggcatcaacgatgatttccccaatcggtccatttccttgaattcgtacagttagcttatccttgccttttaacatcgatgccataagggctccgcccatcattgtccgtccaagggcagcggaagcagtcggccaagtgccctgccttttgcatgcttctttgaccatttctgtcgctctaagggcaatcgcccgtacctcaccgtcgtaggctgttgcttttactacataatctttcattcaaaacccgctccaatcattggtttttatcgtaaatatattttagcccacttaacgttaactcttgttccaaatgttgaatttgctttgattcttccgcataaagataggctaatccgcctgttgcaatgactttagcatcgtcaagacgttgctcctccttgattcgttcaaccacgccgtcaatcatcgctatatgcccatagaatgtcccactttccatggaggcaaccgttgtctttcctacaacagatgccggctttgtaagttcaattttcggcaatttagatgctttattcgacaaagctgccgtcgaaatagccgctccaggggcaataacgccccctcggtaacggtgctttgcatcaatgcagcaaaatgtcgtagccgtaccaatgtcgactacaatacacggagcgccgtagcgagcaattgctgcaacggcattagcaatccggtcggcaccgacttctttcgggtcttgataatggattgaaaggccggtgcgaatgccaggaccgacaattaagggggttacgtgtaaataatcttggcacatgcggcgaaagcggtgcataattgttggaacgacagacgcgatgatcacaccggtgacgtcgttgaaacggcaacctttttgctcaaaaaaagagtgcagcaacatggcatattcatcactcgttttatcgtgcgtggtcgcgatccgaaatatgaatgctagttggtcgttctcgtcgtagacgcctgtcacaatcgaagaattgccaatatcaatggccaacatcattggctttgaccccctttttaccaaaaagagagtgccatctaggcaccctctattttcgcttaatcgcggttctcctttgtttcctctgaagacggtggtcggttttcgcctacgtttgtcgtttcttcataagcgccttccacttcttctgctgaatcttttgactggatgttcactttcatgtcgccgtttttcttcgacgcatgatggttttcaggcagcttgccttcattaatgagggattggatttgttcggcatcaagcgtttcgagttcaagcaaattcttggcgataaggtctagactatccttattcgcaagcaagatttgtttacaacgctcataactgtcttttatgatgcgttgaacttccaaatcaatttcatgagcaatcgcatctgaataattttggtcgttttgaatgtctcttcctaggaaaacttgaccgccagaactttgcccaaattgcataggccccaatttatcgctcatgccatattccgttaccattttccgcgctatgcttgtcgctcgttggaagtcattatgagcacctgtggaaacttcaccaaattgaatttcttcagcgacacgcccgccaagcaagccgacaattttatcaagcagctcaggctttgtcataaaataacggtcttctttcggcagcatcatcgcgtaaccgcctgccattccacgagggacaatcgttactttgtggaccatgtcggcgctttccaacttgacgccaacaacggtatgcccagcttcatgccacgcaacaatgttcttttctttttcggaaatgacgcggctttttttggcaggacctgcaatgacacggtcaattgcctcttcaatatgttccatgccaatttcttttttgtcgtttctcgctgccacaagcgctgcttcattcagcaaattctcaaggtctgccccggaaaaaccaggcgttcgaatcgcaatgagatcaagctttacttcctcgcgaagcggcttgtttctcgcatggactttgagcacttcttcacgccctttaacgtcaggggcgttcacttgaatttgcctgtcaaaacgacctggacgaaggagtgcgggatcaaggatatcagcacggtttgtagcagcaatgataatgatgccttcatttgcactaaaaccgtccatttcgacaagcaattggttcaacgtttgctcacgttcatcatggccgccgccaagtcctgcgccacgctggcgcccaactgcgtcaatttcatcgataaaaataatacatggggaattctttttggcgttttcaaataaatcacgcacacgggatgccccgaccccaacaaacatttcgacgaaatcagaaccactaattgagaaaaacggcacgcctgcttcaccggcaacagcccgggcaagcagcgttttccctgtacctggaggaccgacaagcaacacgcctttaggaatccgcgcccctatagcggcaaacttgcgcgggtcttttaaaaactcaacgacctcgacaagctcctgcttctcttcgtcagcgccggcaacgtctttaaacttcgcctttttcttctcatcgctaaccatttttgctttgcttttgccaaagttcatgacgcggttaccgccaccgccgccaccgccttgggcagaactcatgagaaaaatgatgatcaaaaagattagtaaaaacggcgcgatcataatgatggttgacaaccagttgctttgttcttcttctggttcaaccgtcaattcgacgccttctatattagagagaaggtctgctgtaatatctgaattcagaatcgttgtggtgaaattttcgccatctttttgcccggcaaactgtcctgtgacaactaaaacagaacgctcaggctgaacggtaatattttccacttctccttgctcgagcttctctaagaactcatcatagcgaacttgctgggtttctgtaggatcatttgaaaagctttggacccctgcaataataatcagcatcagtatcgtcaagatgactatcgtgcgtactgtacgattcattctgtacctcctcccgcgtccaacaaaactgcacctatcttaccataagaaatcgttctataccaataattagccttcataaacttcaggtttcagtattccgacataaggcaaattccggtagcgttctgcaaagtctagaccgtatcctactacaaattcgtccgggacaacaaaacctgtcatatccggcaccaaatccacttttctgccttcaggcttatcgagaagcgttaccacttttacagacttagccttccggtatttaaacaactcgattaaatagcttagcgttaagccgctgtcaatgatgtcttcgacaattaagacatcacgcccttccactttcgtgtcaaggtcttttacaattttcacttcacctgaggagacagtgctttttccatagctggacacgtccataaagtcaatttccaaatgagtatccacagctttaatcaaatcagccatgaaaggaagggcgccttttaaaacaccgacaactagtggaaaacggccttcatactcttttgtgatagcctgccccaattccttgattttttgctgaatttgttcctcagtcaataaaatttctttcatgtcgttcttcatgtacggtcatgtacctcctgtaagttggtgccttttttttcgttatggccatttatgttgggaaaaagtaacatggagtagctcgccttgtacattagcggagcgggtgagaatgcgggatgtttgaagtgaaggcacccaaagaatcgagtcatttgcatcgacaagcagaggccaagcatctcttttggcgcgatctacttttcgatcgataaacaaacggttcacttttttgcttccgctcattccgcttggggacagcttatctcccggcttgcgatttcgtatgtatagcggaaaagccacttggctcacctgaaatgaaacagcatccgtatgttccaattccaatagttcttctcgtgtatccgccctgattactccaaggggcgtgtctactttacctgggatactaagcagatgacaataagcttttgtttctataaaaggggctgttgtgaacaagcacgtcccgtaggaacgtttcacttgtaccctacctggcaaatctagttgagcggaaggggcacttgtttggagaaacgcttggatctgctcaattgcatcaggaaaaacacgcatgtcatttactccgtaaacatttaagtgaagataatttaatattagatgaatcattcttctttgtaaaggaaagggggcaagacaaagcgcctgaatttcaagttcaatgcttttctcgctttttttcgttaaaatttgatccaaatgagctttcgcctgctccattaaataatggttgtcctcctcttgccagcggtcaaaacggccaatatgtttatgaatatgggggttttcctcaacaagataaggcgccatgttcattcgaaaccgattgcgcgtatacgcatcggaaaaattgctctggtcgattcggtaaggaatgtccttttcgttgcagtaggcgacgatggaacgcttcgtttcttcaagtagcggccgcgccaacacaccatttgcgaatggcctagtagcggcaatgcctagcttcgtcaacggtgtcgttccgcgagttagtttcataaaagccgtttccacttcgtcgtcgccatggtgggcagtcaaaagcacagtagcatgtactcgctccatttccccttggaagacttggtagcggagggcacgggccgcttgttgcgttccaacatggtgctcggctttaaaggcagcaacgtcaacgtctttcacattgcacggcacgccgaggcgagcagagaaagattgaactagttcggcatctttatttgactcttcgcctcgaagtcggtggttaacatggacgacaaatagattgagcttccacttttctcgcaaattggccataatggcaagcagcgccattgaatcggggccgcctgagacggcaacaagtacgtttgtttccattccaaacaatcgattgttttctataaactgttccacgcgtgcttccattctattcgcccctatagctctcttcaaaatgattgtatcaataagtataggacaaaaaggatgagaacaaaagacatcactaggattaagtcgatcggcgcccctttctgttttctaactttatgttgctgtttccgtttcactcggctacgctcttcggtttgcttcaccgaggcaagaaagtcgtttttcattgcttctgcagatccataccctcccattaatgctttataaacaatttcccggtaaggttttaagagtggcgcttggtaaataagcttttttaattggcttgccgtattgccccgctctttttttacttgccgcgggtaggcacagtcgacgaccatcattgcggccgcaaataagtcataggtcggctccgcctttcgtgttccttgttcccagtaaccccggtcataatactcagtatattccttaatcgcgcggcccactcgtgtggttccgcctacatctaacagtctgacttcagctgaacgacgagtaacaatcacattttcgggctttaaatcgccaaatacccagccttgttgatggagcgcgcttaatgcactcaacaattgcaatgccaatacaggcagccactctggccctttgcctcggaggaagtcaacaaaattttcgccttcaatatactccattgcgtaaaaaggaaggacactattggtagacaggaagtcgtcaacgtcaaataagcaaggcccaagcggcttgccttggaccttgctgaactgtttcagtacattcgcttctgctgtaattgacatcggttctgtgccaatctttaacgccactgaacccgtttctccttctgccaagtaaacatagccagtgacccctgccccaagttttcgaatcaacttataaggtttacggttccacttgccgcgaaatgccagtcctgggtaaagttcaaaatccaaatcgcccttggcgctgttcattctcatcgtcttccaatctccttttgccccgtctttcctcaaacacttggagtgctgcttgcaaagctgggccagtcggtgtcattcccgccgttgacagtttcgtaaaagtcgcagtgagtgattggagctttggtgtccaatcaagcaacctttcaatcggctttcttttcccgggaaatgaatacagagaaaattttgtatcccctgaacgggaatttaaactaatggacaaatccaataacgcttcctgcaccatcggtaatttatttgtcatgcttgcactcgtgtcgattaacacaagtacctccaagagcactttctcccctagatcatccactacttccatcacttgcccgcgtttttccggcggcaagtcttccatttcatcattctggcctaatatttgtttaagttcttggttaacgacaccgtgaagtgtttgcgtcatcgcttttcttgttaccatctgaactgttttggccagttgcctggcaaaaacaatttcgctaacccctccaccagctagagcaatcgcttcaacctcttgaagtcctttttcattttcgcggttttcatcagtaatgccgattacatttaccgtaacgtcatactcttgggccaagcgcgcaatcgctacaggatcttcgccgtaattcgaatgcccgtcggtcatgagcaaaatttgccttaatgtcccattcattcgtttcccctccatctgatttcgtgttaccatcatggtcatattggagggaaaatatacgtttatgtgcctgttgcctgtttatagaacggcgcggattttttgtttttagtcgtcttcggatggatcgggatcgaagaccatttcggcgtattgtgtttcaactgagtaacgacgatcgtcatatcgtcttcaatgacaattcctttttccgaccgaatgactttttctaatagcacatcggccacttcttgtgggtcatcggtttcaatttccttaatcatacgtttcatccactgctccttgttctcaacttgccttttcgcatcaaacaccccatcgctgcacataatcagcaagtcacctggcttaagctgctcgctaacaacgtctacttcaaattcgtggaaaatgcccattggcaaattgcctgcttcaatttttatgacgtggtctttccgcttaataaagcttggcgttgatccaattttcaggaactttgctcctgcatcttgcatatcgatcatcgccaaatcgagtgtggagaacatttcttccgtgttgcgcaatgacaagatggaattgactgatttgattgccactgtttcttcaattcctgattgcagcactttttgcagcaacttcaacgtctcactgctttccaaatgggctttttcaccgttgcccatgccgtcgcttatcgcaaccgcgaacttttcgctatttaatttgatcatggcataattgtctccagacagccattcgccgcctttggcgactttggcaatgcctgtttcaacagcaaaaggctttgctgacccaaatgaaatatggctatatccatttgaataaaagcctggttcttcccgcattaacacaatcgtttccttaactaaatcagaaagcattggcgcgataattttttccgcctcgccattttcatggctgcataacacactcatttcaatttcaatgctgccactctccatgctgtaaatgtctatatgcccaacctcaaggccagcgttcctcaaagcatcgaccatgtcttcttcttggatgacatgaggttgcttttctttttggatttctttggcgaaatcccccattacccgggaaacgccaagcaattggtcggcgactagccgttggctctctaacacttgcctcttcaattccttgtttgcccgataatggttcacttccgcattaagggcagccatgacttggtcaggcttacggcaatggctgcgccattgcctttgtaattttggatcgacaaccgttccatgcacctcactttcctggaccatttgcttcatagaatcataagtagcattaaaattttgcacccagcacttttctttcaacatgcacgtttggcatgttttttctgtcacgcggctcaggaggacatcgacctcatggtcatgctcttcttcctcatttttagaaggtgtatgaaagctgttcgatagcgtttggaataaagacgaaaaccgttcaacctttccagctgtcgcgtcacggactttccgtaaatattgctgctgttcctgggaatgctcaactgtcccaggaatatagcgtgctaccttcgtcagccagctcttcggcgtcagcaaaaatagcgtgatcgcaatggcagattctgacacacttgccccaagcccgcccccttgaccatacatgccaattaagagcgttcctacaagtaagccaagtgacacgccgatccgtttcccttcctttaacaaccctcctaacaagcctgcaaaggcaagcaggctcatctgataaagacttgctaaactcgccaagcttaaaatcaagcctgtcaccactccgacggtcgagcctattgcagccccgccaacaaaagcaaacactaaaacgagataactggcaaagctatgctgaagcacagcctcatttatcgtccaaccgactgttcctgtcattacagaggcaagcaagataattaaacaaataatttcttcattccgaagtgcttgtccacctctttttcctgtcacaagcggtatgctttggataaagatcattgtcaggataaagcttagcgccgcttcgactgtagccatcatcatcgcatattggcttaatccaccttctgttagaaatacgagtgacagccttgtagcgatgctagctgaaaacacgagataagggagcgatttagcagggtgtttcatgaacattttcatacatttgtacaggataagaaagaacccgatccctgcaatcgcaaaaataaactgaccatgaaaactaaacacggcacctgctaataacgaagctgcagcaatgagtgattgagagcgccttaacaaaaacacagccgccaagaatggcaagataaatggcgtcaactctgataaaatcatagcccttcctagcagaaaaccaagaatggcaatgaatatgccccaatcataaagcaccgttttggctccgcttttaagggcttgtccactgcttgcacatttggtccatatgccgtttagcttttcggctactttcgctgtacccatttcttctgacgtctttatcactttactgatcattctcgccaccaccctattaatatcgtacgttcactatagcaagcaaagctggagcaatttgtcagaattaaggaccaatatcaaaaattatttcgacgtacttcgggcgaatcagtgtggatgattcacaaaaatcgaataataggggtttggtgttagcgtatctttggatagatgctcaatggttggctagaaatgacggacgaatttaggcatggggaacaatcttttttctcagtctgttgcttttgccgccaacatcaaaagccgcacctaacgatgcggcttcaaatggtagacaaacgcatttttttctgagtgaagcttttatgcaaatgtaataatgccgaggatgtaagcgatcacaagcatgacgatgctaaatccccacatgataaaaaaggaatagcggatatgtttgcccatttcaaggcctgcgagttgcaatgccagccatacagccggggcaagaggactaacaaatgtaccaatgatgtttccgattacgagcgcatatgcggctgaagtagaagaaactccgacttcggttacaatctgttcaacgagtggcaacaatgcaaaataataggcatctgtgcttaaaattaagtcaaatgggacgccaaaaaagccgataataacatgaatataagggacaacagcgtgtggaagcacgccgactatatcgactgctagtgcctggagcattcccgactcgtttaaaattcctaaaaaacagcctgcggcaatgatgatcgttgccatcattaacgcatttggtgcgtgctttttaatggcttccatttggtcgtctacgttccgtaaattaaacggcagcgccagtgccacgccaagcataaatacgagcggggccggcaagacgtcgaccgccaatacaataatgacagcagccattaggagcgcattgacggtcatttgcagagcgcctgctttcttttggctttctgtttctttcgagtcatttgccgagtatgctgtagctgctgcttcattccatacggagcgattggcaattcttttcttttctctaatagcaagcaacaccgctagaccgatcagcaacgcgatgccaataagctgcaaaggaataagcggcaaccaaagttctccggcgctcatattaagtacggtaccaacacgcgctaccggtcctgcccacggcaccatattcatgatgcttgcccctagaccgactaaaagcaagagcaaatacgggctcatttgcaaacgcttgtaagtaggcaacagcgccgggatggtcagcaagaacgttgtcgcgcctgagccatcgagatgtgcgacgcaggcaacgatcactgttgctactgctacgccaatgacatttccttttgagagggcaagcactttattgataacgggatcaaacaagcctgcatcttgcataatgccaaaaaagagtattgcaaaaataaacatgacggcgacagaaatcacatcattgacacctacactgaagaaactaccaatgtcatttaaatcgaagcctgcaacggccgcggctataatgggaataagcgtaaaagcaacgattggcgacacttttttgctgataagcaatgcgacgactgccacaatcgcaatcagtccaataaaactaagactaaacatactggtctccttccaagccttatactgagatttctcttatcttaacgaaacaggcgcctcttgtaaccgtttccaatttaatgggcattctattcattttttttattttgtccattttgtttatgagacacaaaaaaacccttttttccttaacagaaaagagggtttcatccagtagaaaacgctcaatgtctttctactcgtctgacaaatgatagatagcggcggaggggatcgaacccccgacctcacgggtatgaaccgtacgctctagccagctgagctacaccgcctcgcttttcacgacattagttaatatacttgttttttgggtgaaagtcaacattaaaatctagagcaaaccgaatttccttctcccatttctatcagtctgagtaatgttgtcgacaacatgagaggagcaggattgccctgctcctctctcactcctatttacaaacagatatacgttacacaagcaacatcgctatccgcgttttgcaccccgaccgccgcgtttagactctgtttgccttttaatcgtcgacaaacgttcttcgctatcttttaggaaacggctcattttgtcttcaaaagacggagcagggcgcgactttccgcctccccgattgttaccggagcgcggatgagggcgcggagggcggctttctccttcgggacggtcaaccgctttacggatcgaaagaccaattttgccgtctttttctacattgacgactttgactgtcacttcatcgccaacctttagaagttcatttatatcttttacataatgatccgcaacctcactaatgtgaaccagacccgttgatccgcctggcaattccacaaatgcaccgaaatgtgtaatgccagtcaccttgccttgcagcttgctgcctgcttcaatggacatgaaaacgtacatcctccttaaattttgggtgaactaaacgtactccaatatattatacccgacctgaaattttggtgtcaatcgcttgactgctgcttggagacgttaattcttgtttcccctggaagagtgaggtaatagtcacgtctagcaatctctttaatgaattcatcgtcttgaaaattggcaatgtcgcgcaagagctgttcttcctcattctttagctgttccaattgttcagcagcagcttgttgttcttgccgtttatcattaatatcagctcgttgcgaaaatagcgttacactgcaacaaatagcgagcacactaaagacgatgcccataaatccaagccggcgatagagtccttttcgccttttcgcttgtcggattagttcttgctgcctttgctccatatagtctgtgtcaagttctttaatcgttgcccggtgtttcactgccaagtcgctcacctctcgtcttttttcctaaaacgctccaatcgttcctgccatttacgcaagataggctgtcctttttttaacaggccaacaacgcctagttttttcattagccaatataggggtttaagcaggacataaagaatgatgctccacacagagattactataatcataaccaagcgacgcacagacatcaacaaccattttatcggcatgacaatgagcgcttttaacaaaccccaaacgaaccgtaatacagcctgaacaattgtaatgactaaattgacgaaccaattatacacgcctttaaacaatgcttggtaggcagcatagccacagagtagcgccaaaaatacgtaaattcggatatctccctggtttgtcttaaataaaatataaaagacaagcagcgcttggacaatccaaaaggcaatgtcaagcaaggcgatgtgaatgcggaaagtacgttgccttggcagaaaacggccgtacgtatcaacagccgcgccaagacaaatgcccattgcggccatagcgaccattgtatagaactgaacagttaaagccattatttaaacagttttccaaagagccctttggattttccttgctggttttgatcgacataaatcaggtcgtggatttttccctcaatcgaaacattcccttgctcaacatttaagtttttcatatgaaggttttcgcctcggaccgacaaatagccttgtaccgtttctagcaaaaattcttcgctatcgaaactgtctacttgtttgacgcctgttatatctaattgcttgcgcccgcgcaacgtaacgtcgtggtcgttggtttttctttcacgtcccattggcgtgccaaactcgtaagtagaaccgtccattttctgcaccctcctagaaagcatgtctttattgcaatgtatgcatggggctttgcccctagaacaagcttctagcacaaaacatcctctcatagagacggctggtcctatcgcttaaagggtgttgcttccacttatgaaagttctttgcccttttgcggttctgtttttgggcgctcttgaatgcgacgctttacgttgatgccaatggcaagaagaatagcgactcctaacatcccgtaagttaagtatgaatgaaccatgttctcggctgcacgcccatatacataaaagaggatgccaactgcataaaatttaacagccctcccaagtgcggcgtaaaccatcagtttccatagcgaaaagtggagcgcccctgataaaatcgtaaatactttaaaagggatcggcgtaaatgcgccaattaatatagcagcctcaccgttcttcttaaacagattctcggcctttgttaaagcgcttggttttaaccacttttgcaagacagagtttccaagcaaacggccgagcatatatcctactggcgtgccaagaagacaagcgatataccccactgttgcaaaccaaatggcttggtttgggtggagcaagcttaaagacacttgtagaaaaaacgcaggcactggaaaaatcacagcatctgcaaaggcgtgcacgaacaatccccagtaaccaaaatcttccaaaaaccccattattccgtccaatcgattggcgcccctctctgaaacaagagcttcttttattctctatatttatgagcgctggcgctgtctaagtacagccttgccaacttagttcattagctgtgcttgtttctcctgctttagctgctcattttttttcttaaatttttcattatgggaagatacatatgcttgcttatccgctttcgggtccaaaaactgcttaacgccatttactgctgttgccccttcaacaaacgcccccgatatgagctgaagtttcccttcatgccttgtcacatctccggctgcaaaaatgccaggctgacttgtctccatacaggccgatacgcggagaaagccgtcttcttccaatgcaaggcctgcttcgattaaaaagcagccatctagtttcatcccatggtttacaatgacagcatcgacttcgatttgtcgttgttcgcctgtatcacaatgagcaagggtaaccgcttcaatcgcagagcctacgccatgcagttcttttatttggtagggcgtgtgtatttttgttacagatttcatttgctctacatttttctcatggccgccaaattcatcgcgccgatggcacacaaccacttcttttgaaatgttggcaagttcattcgcccagtcgacagctgcattgccccctccagaaattaaaacccgcttgtttgcaaatatgtccatttgcgtgaccgtgtaatggagattggaaatttcataccggtcggcaccctcaatttcaagcttttgcataacagggatgccatgcccagaggcaagcatgaccgcccgtgtataatgggccttaccttgctcattaaaaagggtgtacgtgttgtcaggctcccgcaccatccgtacaatgtgttcatttaaacatatcgttgggttaaaggtcgttgcctgttccacaagctggttaattaatgttctgcctgttgtaggcggcattcccccaacatcccaaataattttttctgggtaaaacaaaattttgccgcctagctctttattgtattcgacgagctttacttttaaatcgcgcatccctgcataaaacgtgctatataaaccggctggcccgccaccgataatcgttaggtcaaacatctctttttcctgcacggttattcctccgtccactctataggataatgaaaatcattctcacttttcttttagtttagaggaggaatggaccattttcaagcgccaaaatgaggtttacaacaatttccccatataaatctcattaagccacttgtggccatgtcggattgcccggcggcggacgccttcttgctcatacccacatttttggtacacgtgcagcgcccgtgcattctcttcaatcaccgttagctcgagtcggtgaagctgaacgctctgtgcaaaatggtccgctttctctagcagcttcctgccaagtcctcggttgcaataatcctctaaaatcccgattgtaatatagcccacatggcgaatgcgctgcaatcgggaaccaaacacactcagatagccaatcagcttcttgtcgtgttccgctacaaaaatggtggatgacggagactgctggatatcggcaatcgccttccgctgttctcgcaccgttgtcgttctttccccaggctcatagagcatataactcgcttctttgtctaattgcaactgcaattgcaaaaacggctttgcatcgctaattgttatttctcgaagttgcacaactactcgcccccatatcctaattaactttctcagatcattctacattgatttattccctcctgcattaaggagggaggtgacaaatcaagcatagattgctatcgttacacttagaggaggggtacatatgagcaaaccaactgtttttttagcacgttcgttgcctgacgctgcgcttaaccatatctcacaattctgccatttgcggatatgggacgagagcaaaccgctaactagagaagcattggcccacgaattggctgatgtggacggcgcgatgctgacaggaattggtgcagataccgagctcgttaaacatgctagcaagctaaaagtgattagcaccgccaccgtgggctacgatggttttgatgttgcaggcttagcggagcaaaacatttatgtcacaaacacgccgtatgttcttgacgaaacggttgcagacttgctgttcggcctcattctatcaggggcgcgccgcatcgctccactgcacgaacaagtcaaggcaggcaactggacaaaacagacgacggcacagtctctatatggtcaagatgtctacaaccaaacactcggtattgtcggcatggggcgcattggcgaaaaaatcgtccatcgcgccaaggaaggttttgggatgaagatcctttaccataaccgctcaagcaggccagaagtcgaaaagaagtatggcgccaaaaaagtagaattacacgagctgcttgaacaagccgacgtcgttgtcatcatggtaccactgactgaggcaacaaagcatttaatcggaaaagaagagctaagcaaaatgaaagaaacggccattctcgtcaatggggcccgtggtgccgttatcgacgaagctgccctaattgaagcattaaagcaaaaaacgatttttggtgctgctcttgatgtgtttgaagtcgaaccattgccaccaggacatccattgctagagttggataatgttacattgacacctcatattggctcagccacagctgctacccgtgaagcgatggcgctgcgcgctgcagaaaaccttgtggctggagcactcgggcaaaagccccgcgatgcgctttcctaaacagcgtcgaacattctagccgtaaacaatttttttgtttacggcttcatactgtagatgcatgctcgcatacatcatacgtcgtcgtttgccttagtcatatgcttatgaacaccggttctattcgcagcttccctcacctgcactccttatcaggctgaatgcagttattgatttttctcgatcacgatttccgccgcttgcggttggatttgccctatatcgtttacttggtcgtgtgctgcactcaagtcttggctacctgaatttgggttaacaaagccaatgacgcgcattcctgcggccaatgcagcctgcacgccatgtgcagcgtcttctaataccgtgcaagcgtccggttgaacgccaagtttttcggctgtttccctataaacgtcaggtgcaggcttcccgttagcgacttcctctccgctcatgacaacatcaaaatagtcgctgatgccaaaactgttaagcactgcttcaatgaatggccgtggcgacgaagacgctaaaccaatgcggtacccgttattttttaaagctgcaagcagttctttaatgccagagatcggttcgactttcccgctgacaacataggcttgctttcgctcattggcttcattcagcacggcagatacttcaaacgtggccccgtgtgttttcttgatttgctgccacatatccctcgcgcgggtgcctacataggattctaattctttttccgccagctcgacgccgtatttcttacacacatcttgctctacttggaaatggagcggctcgctgtcaatgatgacgccgtccatatcaaaaataaaaccgcgcattatacagactcctctttaacaatcgtatacatttcagcagcttcttcttttcgtgtggtatcacgtacgtcgtttatttttaccgtgacgattttttgtccaaaccgaatcgccagttcatctcctgcttttactgttgtccccgcttttgctacttggccattgaccgtgactctgccttggtcactaacttctttcgctaacgtcctccttttaattaggcgcgacacttttaaaaatttatccaaccgcatccaatcactcctcttattcgttaaatttgcctttcgcttcattccaccagcgatccagttcgctcatctctatgtcggctatcgcctgccctttttcctgcgctttttgttcaacatacaaaaaccgctttttaaatgtagtcaacgaacggtggagcgcgatttctggggatagatcataaaatctagccaagcttaccgctgcaagcagaatatccccatattctttttccattttgcttttgcttgacttggcagcttccactttaaattcttctatttcctcaaacaatttttcccacacttcttcgacgttcgcccattcaaaaccggtcttggctgcacgctcttgcaaggcggctgcatctacaagcatggaattggttgcagctagcccgtctaatgcagacttgggcttgggctgttctgcttgttcttgcgcttttatttgctgccatgtctgtaacacttcgccagcagtttccgcctttgccccgccaaacacatgggggtggcggcgaatcattttttccgtaagtgtcccaatcacatcatccacgttaaaatagccttgttcttcgccaatttgcgcatgcaggagcacttgcagcaagacgtcgcccaactcttctgccaaatggctgtcgtcttcttcatcaatcgcctcaaacacttcaaatgcttcctcaagcaagtaccgttttaatgtatggtgtgtctgcttctggtcccaaggacagccttccggcccccgcaacgtggcaatgacgcctcgcaaataggagaagtcgcgatgcaataatcgatcctctcttacaggcggcacatatacagcggttaaattgtttgcttttacataatggtccaattcaaacaaaggcactcgcaaaatcgactgctttggcgtgccagctgcggtcacaatcgatacttcataatcgtctggcaacttttccattaacgtcagttttacttctgacgcgatcagtgcatcgtatacttgcacgatgatgaggtgatgacgaatttgcaactcttccgctcgtagtgccgtgccgtcaacaatttggcagccttcaatggggtcgattgccaaagctgtgtacatgttgtccaaaaacgaggcaccgccaaggacatcgatcgttacacctgttccttgcgcttgcttttgcaaaagttgaatcgtccgctccgccacaaatggatgtccaggcacggcataaaggacgtcgtcttgttttgcctcttccagcaagcgcgttgtaatctctttataaacatcttcaaattcgctatgttgttcataaacagaatcaaatgacgtaaacgccagcccctcttccgctaattccactaggacgggatggttgtctgtacgtacataaatgcgattcgccttttttaaggcacggtaaatgccaagcggcagttgcgcaagattgcctgctcctagtccaacaactgatatggttcccatagtcaccttgcctttactttaaaatattcattgcttttcgccgccaatttgccagctttggaacgcttgcccactcacgcaatgtcaaaacagaactggcaagcaaacaacaagcaacggtggccaccccgacaagcgatgtggataaggcaatcattgtatcgcctactcgttcctcacttgtgaaaagaaacgcctctaacaaccacttccatccataagcgactaggaacagcaagaaaagcgtcacgccagtgcttatataggaacgtttttgcacaaacagaacaccatcttggcgcctaatcgcgtacagagcgagagccgccatcgccaaaaaggcaaataaacttgcatacgccccacccattgctgatgccatcactgggataaacaagaggttacccgccagctttactgcaagaccaacagccacggcataaaggggaatatgaattttgccatagccttgcaaaatcgctgcagccgtcaaatagagcgaagcagggaaaatcgagacagcaacaacttgcaagatgtctgttcctgcacggtctgtaaacagcatatggttaaccggtcccatcagtacaaccaagccaatcgcggcccctccccctagcaaaagcgtcatccgaactgctgcatcgcggtacatctgcgcatgttgctcctttcctcttgccagcgctttagccaacaggggaacaagggcgagagcaagggaagtggcgagcaccgtgccaagctgtatgagctgctggcctcggtcatacacaccctttgccaaataagcttgttcttcttgtaagcctgcttcttggagcaaacgaacgatagtaaaaacgtcaatcatttgaaacagcaataagactaaagcgttgatacaaacgtaaacgctttgcgataaaatcgatgtactttgcctaagcgctgagcctatagaggcgaaggaaagcgcccattttttccatttaatctgccttgtagcaactataacaacgatacaaccagctaagctccctaaaagcgagccatacacagcgcctgtgccgatcatataaggcccactattagcagctgccaaagcatatgtcacaacaataatcgccgctacccgtataagctgttcgcctatatgggaaaaagctgtcggtttcatatcgccgtatccttgtccaactcccctacctacgctcaatataggcaaaaacaaaaagccaatgcttacgaggcggagaaggggggcaaggcgttcatctcccataaattgggcaactaacggcgctgctgctgcacatccaatactagcaacgacagcgaatacggtcattcccacaaacgcttgtctggccaattcatttgcttgtttttctagcccttgcgccttcttctcagcaacttgccgggaaatcacaactggaaagccataaagggctagaatggcaattgtcccgtaaaaagggtagatttgctggtatacgtaaaaaccaaagtcaccagcaatgttttgaaatgggatccggtagacagccgatagtaccttagccatcagtgctgcaaacgcaataaacactgcgcctttaactgctcccgtcctgcctgaatcacccaaccattgtttgctactcataacataaacaaagcgaaaatgagcctattgctccattgtttacggtgttattaaaagcagcattcctctcctttttgacactaacacggtgttctctgcaacgggcttcgatcccctatgtaggatggtcggccccaaccgtccaaccggtatttttgcgtctttctctatgtatgatactaataattattttctttttccagtgcgcttcaatccgactagagaaacgtggtatgatagagggtagaatttgataagcgaaggtgatgttttgaaagcgcgaaacctatggttttcggtctggctccacccgcgtaggcagatgcaggatgtccttcagtatggcttacataaaaaagccgccctattgatctcattattgtttggcttgcttacgacattgtcctattctcacatccaagcctttattttgctaggcgagttgtcagccgcctccatattggttattttagtgattggttctttgatgggtcctttgctatactacgtgtttggccttcttctgggaaaggtcggcagttggtatggtggcaatggcaatgtggaagcaacaagaaaagcactggtttatggcttttttatgccaggaatcctgctaggacttgtcagcatactcctttttggtatagcctatgtgcaggcttattttttacacagcaacgtcgtatatatcatttaccaaatcggcgtgtttgtccataacgtggcttcgatttggttaatcggcatttttctcgttgcttttgcagaagcgcaaaaaattaaactgtggcggtcgatgctgattttgatcgcttttcttggctgtatggcgattctttttatcgtcattgaccaaatcacacggctttttatataggaattgaaatccgtttgaacagaagggacttttatgaaaaaaattatttttactgggggagggtcggctggccatgtcaccccgaatcttgctattatcaacgagcttaatgacaaagactggtcaattgcttatatcggctcttatgaaggaattgaacggcaactagttgaaaaggccggaattcgctactttggcatctcaagtggcaagctacgccgctatatggattggaaaaatgtgaccgatattgctcgaattgcaaatggttttcgccaagcccggaaaattttaaaagcggaaaagcctgatgttgtattttccaagggtggctttgtgacggtaccagttgtggcggcagcttatacgctccgaatccccgtccatttgcatgaaagcgacttgacgcccgggcttgcaaaccgcctcgctaaacgatttgctaacacattttatacatcattcgctgaaacagccgcccattttccaaaagaagcaaccacaacggtcggctctccaattcgccgcgagcttctcgaaggctcccgcattcaagggctgaccatcactgattttagccgagagcggccgacattgctcgttatgggcgggagcttaggggcaaagcggatcaacgaagccattcgcgaatccctcgatacgcttacaaacacgtatcaaatcattcatatttgcggaaaaggccacctcgatccagcgttggaagggcgccgcaactataaacaatatgaatatgttcatgacgaactgcctcactttcttcaagcggctgaccttgttgtcacacgcggcggttcgaatgccatttttgagtttttggctttgcacatccccatgcttatcatccctctttcacgagcacaaagccgtggcgaccaaatcttgaacgcccaaacttttgtcaaaaatggttacgcccgcatgttagaggaagaaaacttgacaaaggaaacattgcaacaggaagtccaagagctttataatggaaggcaaacatacattgaggcaatgaatgcgagccaagcaacaaacgctgttgcctacattacagagaagcttgagcaagaggtccaataaaaaacgcccatgggcgtttttttattggacttatagagcaccaacgattgcgagtaaaaagctaacaacaaccgcaatcacgacgagcattgctcctaaaatgaggacaaccaaaactgatttccatgcggaaaattgatgggcttcgccaattccatgcatcaaaagcacgaatgtccaaatacccgctgtcagactgataaggccgaggatgttttgtgcccacagttgtagtggcgaaagcgcgatctctatccctaacagaatgctttctaggtcgaaccaataataggtttcgccaataacaagaataaaaggaatgctaataaggccatgaataatcaatgggatcatgcttgtatgtacagtagcgacgcgaaggtcaagcgctgtcccttttcccccaagccaactgccgacccacttgtatagccaagagaggacatacaggctaatcggagctaccacaatgctagtaagtaaagcaaacacaataacgtaaacaaatgttggaacaactccgcttgaaaaattcgtaaaagtgctcagtacagcagacacataagcaatcagcaaataattccatgtctgcttcttttctctggctgtttttaattcgtcagcgacaacttgacggggacgaatccatactttaaaccaattttgcatgttttttgatatacctcctttttttacttgaactcttatcgtatcatagtctcttttcaattgatgcaaagaaagcacacaaaaaacaccatgttctgcccatggtgtttttgtcgtgctactgctccatttgcctagccaaaaagccagcagcggtttcagccattttttgttcaagattgccgttcaatggttcgtttttagagaagattaccactgtaccaatgggatcgccgcccgcaataattggcgcgaccacatatccttgaaaatcgtctttgtgatcgccaacaaggttgtattctccagcattggcttccaagtaagatttacgttctaccatagcagactcaaccgcatcgccaattgccttattggcgaattctttctttggcgcccctgctacagcaatatacgtatcacgatccgagatgagtacattttgatttaagctatcataaagggcttccgcatattcttttgcaaaatcgccaagctcggaaatcggcgagtattttttcaaaatcacttcgccgtcacgatcaacaaatatttccaaaggatcgccttcacgaatccgcaatgtgcggcgtatttctttcgggatgaccactctcccgagatcgtcaatgcgtcgtacaattcctgttgctttcataagaagagcctctctttctgaaggtgtttacacagaatgatgcaaatcagaagaatacattcaatggggtgtaaatgtagtattcttccgtttccatgaactattcaccagcgaatgaattattttgtaatcttttttgaaaggaggcccataaagcagaaaataggactagccttacgacgcagacatcgctttctttgacttgtcagcacggatcaatgcttccagtaattcaatgatgtacgcaagcaatgtttcatcagaaagttgctttgtcttaataactagtttaatttggtttccttgcgagccgatgctaacgtcacgaccgattttttgggcagcatcgacaagcgttgcaacatggatgcgattggttgtttcctctgtcaataaaatcgtaacggcgtctttgccttctgtaattttttcgactttttcttgatcggcaatcagcttaatttttgtcatttcaaaaagataagcgacttgttttggatattcgccgaaacgatcaacgagttcatcttgcaggtcagcgatttcttctaacgtttccacgcctttaaagcgcttgtacatctcgattttttgtttcgcgtcagggatataccgctctggaatgtaggcgtcaatatttacattcagctccgccttaaatggcggttctttcggtttttcccctttccgttcttcaatggcttctttcaacatttgcgaatacaagtcaaatccaacagagtcgataaagccatgctgttgagaccctaacaagtttccagcaccgcggatcgttaaatcacgcatcgcaattttaaagcctgagccaagctcagtaaattctttgatggcctgcaggcgcttttcagccacttcggttaacactttgtcaggctggtacgtaaaatacgagtacgccactcggttcgagcgaccaacacgcccgcgaatttgataaagttgggacaagcccatcttgtcggcgttgcaaacaatgagcgtattcacgtttggaatgtcaacgcctgtttcgataatggttgtcgttacgagcacatcgctttccccttcaaggaaatccaaaatgatcgattccagttcacgctcattcatttgcccatgtgcatagcttactcttgcatcagggacgagcgtagaaatttgctccgtcatccgctcaatgtcttctacacggttatagaggacatacacttggccaccacgacttagttcacgctcgatcgcctcccgtacaatggctggattaaactcaacgacatacgtttggacaggaaagcggttttctggcggcgtctcaatcaccgataaatcacgaacaccgagcatcgacatatggagagttcgcggaatcggcgtcgccgtcaacgttagcacatcgatattggccttcatgcgtttgattttctctttatgggtaacgccaaaacgctgttcttcatcgacgatcaataaccccaagtctctaaactgtacgtcttttgaaagcagacggtgcgtaccgacgactaaatctacagatcctgcttttaagcctttcagcacttccgtttgctcttttcgcgaacggaaacggcttaaaacgccaactgtaatcggaaagtcagaaaaccggtctgaaatcgtttcaaaatgctgttgcgctaaaatagttgtcggtactaaaatggcgacttgcttgccgtccatgatcgccttaaaggcagcacgaattgcgacttccgtttttccgtatccaacatcgccgcacaataggcgatccattggccgttgcttttccatgtcttctttaatttccttaatggcccgtagctggtcttccgtttcctggtacgggaatgagctttcaaattcagcttgttccgggccgtcagaagaaaagcggtggccaacgcttgcttcacgttctgcatacagcttaattaaatcatcagcaatgtcttcaaccgaagattggactttcttttttacttttttccaatcgcttcctccgagggcataaatcttcggatctttttcttctgttccgacatatttctgcacttggtcaatttgctcgacgggcacatagagcttgtcattgcccgcatagcgcaaatttaaataatctttgtggacgccattgatttcaagcgtctcaacgcctaaatatttaccgacaccatgattcgtatgaacgaccaagtcgccgacagctaattcggaatagcttttaatccgctcagcgtttgatagcttttgccgacgcttaggacgtttcgcccgctttgaaaatacttcctcttcagtaacgacgacaagtttctgttcggatagctcaaatccggtgtgcaagtgccctgtataaatttgcactttacttggagtcaaatccgttatcgcctcaatcaaatgggcatcgattttttcgtcttctaagtttaaagcaagccgattggcacggtcctctgttccggcaatgaacaaaacggtgtaatcgttagaaagccagcgattgacttcagaagtaagcaaatccatctgcccatggaaattttgcatcgatttacaggataagttaatgatttgctctggcttcgttgaaggtacttgtttttggaaaagcgacgtataaagaaccggctgcggcgcctgttgcagcctcgcaagtgcatcaagggacaagtgcgtaccgtggacgatgctcccttgttcaagcattgccgtatgccattccgcctcttctttttgcaagtgttccgccatttctttgacgcgattcatttcgtccacccagacaaatgcatcttctggcatataagacaataacgattgcggcgtttcataataaagcgacatgtatttgtacatgccttcaaacgtagccgattgcttcagttgggcaatttcaaaaggaatatgttcttgcaatttatcccgtgtttgtttgcttgctactttttttagcgttgcctcatatttttcttccaacaacttcgccccgtggctatagtgttgatgatggagcagcacttcttgagcaggaccaattgtgacttcatcaatcattccttcagaacgctgcgtctccaatgaaaagtagcgcattgaatcgacttctgtatcaaacagctcaattcgcaaaggatgttccttcgtaagcggatacagatcgacaatgcctccgcgcacactaaattccccaggtgctgacaccatatcagacctgcggtaacccattgtgacgaaattttttataaattcttccaaatcaccgatgtcctcgcctgttttcaaatggagctggctgctttgccataaagcctttggcggcaacaagcggcgaatgccagctagcggagcgacgacaatgcccttaaaatcttgtacaagcgcattaagcaaatccaagcgctgcgctttcatttccgggctagcgactgcaatttcggctgagatgagctcgttcacaggataaagataaactgtgtcctcatctaataattcaacaagatcttcatatattttttgggcttggtataaattatgggtaaccacgagttggcttcttcctgtttccctgaataacgcagcgcttacaaccgtgcgagcggaaccggtcaggccagtaagaagttgctcattcatgtcattttcaataccctttgcaacagcgcgcacttcttttacgctgcccaccaattgctgcaatcctaacatcttttctttccccctgaatttcttctcttcgcgtattcatataagcggacaaacaagtcgagacgcgttaaagaaaccccgagcgccgtacgtattttcacagatacatactcgactttttaacgataactccttaaaggaacttgcttattgctactcattgacaatgctgaatatgccaatgcatcttatgaacggaaaaatgctttggttaaaaagctgaccaaagcgttggtatttttgttctttctataaacgaagccgcctcttttcaatggatgaaatacgggtaactatacagctgaggattatcactcaacgctgtatagcaatcttcacatatggccttcacatgtatatcaccattctcgtagtaagtcaatagttcgtccttttccatttcattcaattcatgaaaacctaagtcagcttcggttgcgttttcaaatacaacaccgatcgtctgtccgcaatggcggcagccatagtatacagccattttcccacctctttttcacacttggtttccatagtatgagcaaaaaagatggaaaatatccgaattctagtagctgccttttccattgagcttccaacatggcccaagccataggatagctcgttcttcccgtcagaacgaccggttaccgttatcagatcaattaaacgtattcatcacttctagaaaaggcttttctagccacgcctcaatcgcctttgccgatttttcagccgcttcattcataaaggccaattcctctttgcgatacgtatcgaggacataatggacgacaggttcaccatgggccggcctgcctattccaacacgaatacggttaaaatcctctgttcctaaatgagctatcaatgatttaatgccattgtggccaccagcgctgcctttctttcgcaagcgtatttttcctacaggcaagtcgagatcatcataaatcacaacaagctcgtcgttgctgatattaaaataatccataaacggacgtacagcttcgcctgataaattcatatacgttaacggctttaaaagaacaactttttcactaccgatccgcttttctccataaatggctttaaacttttgcttgtccaggggcaagtcaagttcttgtgcgcaacggtcaataatgtcaaacccaatattatgccgtgtgtgttcatactttttcccaggattccctagacccactactaacttcatttgctactcctttacgaaaaaggcataactcagacgagccatacctttcctttacgcttattctacacgacctggccgatcaaggttatcgtcattacgttctcctgtcgcttccactgattctgccgtcgtattgtcttcctctgttgcatctgggtcttcagtaaccgtcggcggtgttactgttacaaccgtctcatcatcttcattgacaatcgtaacgggcacattggcacgaatgtcagaaacagaaaggctgtcgccaatgttcaagtttgaaatatcaaccgttattgattccggaatgtcagcaggaaggcaatggaccgttatttcataaagcaagtggttgacgatgccgccttccttcgctcccggcgcatccccttctaaatggacagggacattcacatcccgttcttcattcatatccacttcaaaaaaatcaacgtgcatatactgattgttaagaggatcgatttgtacttcttgaaccatgacatgatgtttgccgccgttctctaattgaaggtcaaacaagccattttggccaacatcgcggaatgtctttaaaaaggcgacagcttctaccgatacaggtgtgcttttaacctttttgccatataatacgcctgggacatgcccttgattacggagttcttttgtttggtgtgctttttggtctttgcgttcacgagcattcaatacggtcatgatctttcacctctactgtaagatttaacacaactacttacatgtgttccctcatagcttggttttcaaacagacatggatcgttttttcccgtgaccttccgacatcaccagctaaccttaatcaaaaagcgttgacaccgacgcgtcttcatggacgcggataatcgcttcagccatcaagccggcaacagaaagttgcgtaatgttttcccctctttgcttttcagttagggcaatcgtattggttacgactagctcttttattttagaattgctaatacgttcgatagcaggccccgacaaaacaggatgtgtacagcacgcgtacacttctgtagccccttgctctactaatgcattcgccgcaagtgtgatcgttcctgctgtatcaataatatcatcaataataatagctgtttttccttcaatattgccgacaatattcattacttctgaaacatttggtttcggacggcgcttgtcaataatggcaattggcgcttttaagcggtctgccatttttcgtgcgcgtacaacaccgccgtggtcaggcgatacaacaacaatatcatcaagctttttgctctcaaagtaatcagacaagagcggaacgcccattagctggtcaactggaatgtcaaaaaacccttggatttgcgtagcatgtaaatcaatggtcaacacacgggttgcccctgctgtttcaagtaaattggcaacgagtttggctgtaattggctctcgcgcccgcgctttcctgtcttggcgcgcatagccgtaataagggatcacgacatttatcgtccgtgctgaagcccgttttactgcgtcaatcataatgaggagctccattaaatgttcattagctggagccgacgttgattgaatcaaatagacatcacagccgcggatgctttcttcaatgttaatttgcacttctccgtcgctaaaacgcatcactgagttctttccaagtgagacgccgatgtgacgggcaatctcttcagccaaccctttattagaattgagcgtaaacacctttaagcttggatcgctgtaatttgccatttcgttgcttgacctccagttgttcttaaacatcttttttcacgtaattgtccttatttacttgcctcgaccttgcaattgatagcgcttggctcggaacatcatcggtgattgttgaaccggctgccacaaatgcacgctcgccaatctctacaggcgcaatcaaatttgagcctgaaccgacaaaagcgccgtctttaataatcgtcttatgtttgtttttgccatcataattgacagtcacgacgccgcagccgacgttaacatcactgcccacttccgcatcgcctacataagtaagatgcgaaactttgcttccagtgccaatgcttgccttttttagctcgacaaaattgcctacacgcacattttctccaacatcggagccagggcggatatgggcaaatgggccaatcgatgagccatcggccaccacgctgttgcttattaccgaactgcacacgtgaacgcctctgccaagcgttgcagaagcgatttctgtacctgattcaatcacacagtcttctccaataacggacggcccttttatggacgtatttgggtaaaggaccgtatcttggccaatcgatgcgtccgcagaaatatacgttgtttgcggatcaataatcgtaacgccttggcgcatccactcttcgttaatgcgcttgcgcatcgctgcctctgcttgtgacagagccacacgatcattcacgcccatcgtttccgaaagggagtcggtttggtaagctgaaatggtttcgcctttttgccgtaaaatgccaatcacgtcaggcaaataatattccccttgggcattttcatttttcacttctgcaagcgcttcaaacaatgcttcattgtcaaaacagtacgtacctgtattcacttccgcaatcgctagctcatccacagaagcatctttatgttcaacaattttctctacttgcccctggtttccgcgaattacacggccatagcccgtaggatctggagcatgggctgtcaacactgttgctttagctccgtttgcttcatgggtatccattaattttttaattgtggcagctgtaatcaaaggggtgtcaccgcacagcacaactgttgtgcctttttggcttgccaatagatgctcagcacatttaacagcatggcctgtaccaagctgttctggttgcatcacaaattcaattttttcagttagtgttttttttacttcctctgctccatgtccaacaataaccgctgttttatcaaattccaattcggaaacttgatcgactacatgttcaaccatcggtttgccacagacagggtgcagtactttataaagctttgacttcatacgcgtcccttgccctgctgctaaaataaccgcaaatcgtccgctcattatgtccctccagccaatcctttgtcattaaaactatactttaaaaaatgcggtatttcaaggcattccaccgcctttacacagtttaggcagttccagttgtaaaaagccagcctacatttgccggctggctttttacaactggaacattcattttttgccaccctcatttagcaaatggctaaaaacgaaaacacttaccatgttcaggaagttcgacgttctcaaactgtagacaaacgcttcgcttctatgtttcggaagcatgaaaacaagctatttgcactttcaacttgagtggttttgccgacttttccgacaacctcaagaagctcctgcttcctcatagttaggcgcgtcttcatattcgccgacacgctcatactcgtttataacggcaatttggatcttttctctcgtttttgaggaaataggatgggcaatatctctaaattcgccgtcaggcgtccgcttgcttggcattgccacaaaaagcccgttgttgccatctattacgcggatatcatgaacaacaaactcatggtccattgtaatcgatgcgattgcacgcatgcggccttccgtatggacacggcgaagtctcacgtcagtaatttccatgttagccacctctcttattgttgatctgtttaaacaattcgcggtaaaaagaaaattaccttcacctatttcaaatcttttttgctaaacttttttacgaacgaaaaagcacctttcccactatgagaaaggtgctttaaacaatcatccagttttaaacggttgcaatgacttcgacttcaattagtacatctttaggcagccgtgctacttccacacacgacctcgccggcttatgttcacggaaatagctgccgtatacttcattaatacgggggaaatcattcatatctttgatgaaaacggtcgcctttaccactttttcaagtgatgaaccggcttcttccaataccgcttttacgtttgcaaacacttgatgggtttgctcttctactccgcctgtaactagttccccagcaggcgtaagtggaatttgcccagatgaaaaaaatagatttcctacaatcattccttgtgaatatgggccgattgctgccggcgcttcattggtatgcacgactttcataaagcagcctcctttaagacgtttctaatttcgttagaatgtttccttctgtcacatcgatcactttttcacgaacattgacgttcgttaattttgtcaaagacaaataatcatcaacaagcctttctgatacttccgccgactcgactaatacaccaatgccgactaaatcagcttcaaactcttcgagcaagtcgaccattcctcgaagtgtgccgcctgctttcataaagtcatcaacgatgaacacctttgaccctggtgccaagcttctccgtgcgagtgtcatcgtctggattcggtcagaagatccagacgcataattgatgctgaccattgaaccttctgtaatgcggtgatcccttcttacaatgctaacggggacccctaagtaatggccaaccgcataggcaagggggatgcctttcgttgctactgtcatcaccgcatcaatttccttatcggccagcaccgctgcaaacaagcggcccactttgtgcattaactttggattgcctaacaagtccatcatatatagataaccgcctggcaaaatccgttcttgtttgtttaacgcctgcaccaattcgccaattaattgctctgcttcttgtttgttcatctttggcatgaactttacgccgccgcttgcccctggtatcgtcactaacgcaccatagccttcttcttcaaacatgtctttaataatgaccaagtcttcactaatagaggatttagccgcttgataacgttcagaaaaatgggttagtgatacgatttcatggggatgttgcagcaaaaaatgagtcatatctacaaggcgcccactgcgcttcaactttttcataatccctccgcactcataaccgaatatttatttataacataccattttcatccgtatttggacaagtgccgcttgtacgaatcagccgcactgcgtacacttcatcacaaaagccacgaaggccgttataaatccggttaacccgcgactccttttcgacaatgccgaaaaccgtcggaccgcttccactcattaatacaccgttagcgccaaaacgcttcatttgctctttaatatgggcgacctctggataaaggcgtagcgtcacatcttcgagcgtattatggagcaacgcacaaattgatgctgcgtcttggcgctcaagtgccgcgatcatctctgctgtttttgcatgccttgcctcgcttaattttaggccattataaacgtctgccgttgataggccaatcggcggctttgccaaaatcacccataatggcggtggggaagcaatcggcttaattagctctcctctgcctgtcgctagcgccgtgccgccgtacacacaaaaagaaacgtcagaaccaatctcagcgcctagtgtcgccagttcatccactgaaagaccaagctgccaaagctcatttaagccctttaacgttgcagctgcatcactgcttccgccagccagcccggctgctactggtatccgtttcgtaatgtaaatgtgtacgccctctctaacgttgtatcgtttttttaataacgatgccgcttggtaagcaaagttccgctcatcactcgggacaaacccttcagaaacgtctatcgatatgcctccatcggcccgcagtgataagtctactcggtcagctaagtcaaccattgtcatgatcatttcaacttcatgataaccatcttcccgtttccttatcacatcaagggacaaattgatctttgcaggcgctttaattgaatacttcacatcgtcaccttctatactcgcatatgctttcgttattttatcacttgtccgtgcaacataccaccttttctatcctgccagcttcagcggcaaataatctctatacgtaaacctgttcaagtgtgctttattgaatataaacagcctgttgcgcagctgcgcaacaggcttcaaaccattactgtccattttgcaagtttcgttcggcaatttcaatggcgcgttttaccatattccctgcgtctcttgtcgtaatgccaccccagccttctctttggacagtatcataaaaaccaagctcttttgcaagttcttcttttaagcgatctgacataatgcctcgtcttctccccattttaaacccgctcctttgcttgttgctggttatagcccagcacccttagtatgagcaaatggacaaaaaaaagactttctttttgctggaaagaaagtcactgaggcaaacgccgattcttatataattgttgctttttggccattttctcctgacaaaaacagttcaactgtttccgtaagcacatctgcatagctgtaagagacgcgttccaccgagttttgatcttcatccaacttgacaataaacacggcaggataggtctcctcaatcatgcctgactgctctgaagagcgtctgcgtccgccatttgccttaatggtaatacgcttgccaacatttttgtctagtgcccgtttaatgtcaattattgtgtttgccatactcacaaccacctcgctcttcatagtatataacacaattacaaaaaagtcaaattttaaattataacaaccagaaaacctgtttgtcaacaactatctttgtcaacttttgttgtttgtaggatatactaaaaacgcttcctttatgtctgctaataaatgtcaatgacagccctaatcagactgatagaaaacgtttgtcgggcgagggaagatgcgaatagaacggaggttcatgagcatatgagtgagacaaacgacaaagtatgcgagcgtttgtctacagtctgaaacgcctcaatcggtttgaggcgtttcatcttgctcctttaacggcaaaccgaggcgcatagagccacgtgtttcaatgccacctattcctttttgccctgtaatggtgttgcgcagtatttcccataaattaaccgtctctaaaaaagaagtacgactaagcctcgatgcaatatagactggatcaagcgcgtggatgttcactcgttctggggaactggcaaaattagcgccagctttgattaacgtctcaaaatgggactgacaggccccagcaaaaataagcaagtcatcacggctttgtaccgttgttcttgcaatacggacacagtcagcaaaatactttgtgtggcgataagcctttaattcatctcggtttcctttagcttttgaataggcatcatgtcctgtaatcacgacaatatccggttggaccatttccataagcgaggccatttgcgttggcatttctttttcttccatgtggacgccgtaaacggggacgccgaatttttcatataacgccgtgcaacgatttaaataatttaagtctccatctaagtgaagcacacggcctctcatctcaaaaaaatgcggcgtctcttcatagcctgatgccgcttgatattcttgccttcgtttcattaatttcgcatcttggcgaaacaaccggtaggagacatcctctcgctctttttgccgttttttatctgtttcccgttcttttgcggacattttttttagatcggtcactggcgcatccgccagcaaacgcatttcttcaccgactaatgttgccacgccgcgctcgattgcaagcacacgaaacaagacatcgcaatcataagagagtcggcctaccacatcaccaacttgtattgtcatcgcgttgccccctctgcgatagcctatgaagaggcaacggcgatggttcctttatcagtcggctttccgcaacgtggaataaagggcatcgctcaaacgagcaaattcctgcggtgacagcgtctcgccccggcgttttggatcaatccccgcctccgacagcgcttgttcaatagcagccttggcgtccttcccggcaaggttatggacaaggttgtttaaaatcgtttttctgcgattggcaaaactagcgtggaatacgtcaaaaaaccaacgttcatcaatgacttccactaacggcttttcgcgaatcgttaattttaatacacttgaatcaacccgtggctggggcacgaaaacagaggccggcacaaccaccattggctttgcttctgcgtaatattgagcagcgatcgataaggcaccgtattctttcgaccctggctttgccgcaattcgctctgctacttctgcttggatcatgacggtgatgcttttaaaagggagcctgtcttccagcaatttcattaaaataggggtagtgacataatagggcaaattggcaacaacatggataacttgccctttcgaaaactcagcgtccagcacaccgggcaagtcggctttaagcacgtcagagtggatgatctttacattcgggtaagccgaaagggtgtcttccaacaccgggattaaacggccgtcaatttcaaaagcgaccactttgtctgctttttttgccagttgttccgttaaggcacctatgcctggaccaatttcgacaatgccgtcttgttcatcgaaaccacttgcttccacaatcttggcaaggatgttcaaatcaatgagaaaattttgccctaaacttttctttaatgtaaatccgtgcttttttaaaatggcatttgtccgcgctggtgtcgcaatgtctttattcaagttcactttcctcctgtttgtttatccacctcaccgcttcgttaaattcttcaggggtgattcgaaagatgtgcagccgtttcaaaagctgtttcccattagcatagccgatcgacaagtgttcgcctaaacgttcgcggcggcttctcgccccttttcctgataataatcctgcttccattaaatcagcgaccgtcatttgtgctgcaaatggttcaagctgctccgtacgaacagcaagaagcgcctcgcggattgcatcgggggaggcatgctctacaccaacactcttccctcgttgcttcgggtttgcgtccgcttttttgataaatgcgtgcttgcagcctggcactcgcttgctgacaatttggcgaatacggttcccagcgtagtccggatctgtaaatacgattacgccgcggcgttttgctgcaagctcgatttgttttaacacagactcgccgaccgccgatccattggtttcaatcgtatctgcttcaactgcccgtttgatggaaactgtgtcctttcttccttccacaacaatcatttcattaatcacgaaaatatcgttcactccgttctctaaaaagaccatgacgttattgtagcctgttttcacacaaaaaaaaagcaagtgctttgccagcaacttgcttttttccttattaatcaagtattgttactttcacgcttttgcttccatagttcgtagcgtcttcttttgttgggacgtgtacgtcaattttgtttcctttgatagcaccgcctgtatcgccagcaatggcttcgccgtacccttccacgtgtacacgggtgccgagggggatgacacttggatctacagcaatgactttcatgttggcattgctgtttaaatcaatgccagtcgccgtaattccgctacagccgtcacaagccgctgtataagcagtcgattgcatttgcaatgtcttttgttgtttctcttgttccacttcttgcttttcttgcggtttggcgctttcctgtttcggtttttccggttcgcttactggctgatccactggttcttggctgactgtttcatgggccgtttgcgtctcagagacatactcttttgcctcttcttgttttgttccaaccgcaataacacggttttcactctcttcaaccgtttccgtcttcacaagttgcctgtcgacctcgacgccgtcttcaagcgtcacttcatagtgaagagcttgcttgccttttttccctttttctactacacgctccacgccatggtttaaatcgctatcttcttcgcgaagcgtttcaaatgcagttggttcctcaatgacatcggtgactttttcaacacgtatgaggcggatatcaagcccgtcccgcaattcttcgtctaaagctggctcaactcggtcaagctcgccaagctcgacattggcttctttcaaaaagtcagcgacagtcgctgaggtgctccagtactcgccttcattgccgtcataggcaaatgtcaaaagcactgctggcgaataggcaatatgtaatccatcctcaatcggggtatccccacttggttcaatctcgtcttctgcttttggttcgatgcctaactcagtaaacaaatcgtttacattgtcagcaactgtgtagactgtggtctcctcaccggcaacagacaatgtcacttcagctgcgggcttgtaaacaatgtccatcccagattcaatctccgtttgcaacgacggttcaatcaaatcatgttcacctacatggatctccaagctttcaagcaaatccgcgactgtcgattcgtgcgtgcgcacagtaaccttctcgccgttttgttcaacagcaaccgcatttttggtcaactcaaataacccagataaaataagaattagtcctaggaaaagtgcgactgcaatcaagatcctccgcctaatggcagggtcggcttcaggcctattcaacaggttgtgcttatcgctcatcgttcgtccctcctcaagcaccgaattatagagacgaacgaatagcgtgtcaacaacagttacacaaacgtaacaaagcagtaacctttgcaatttgcccagatgctaggaataaaaactaattattgtctttaattccaaataattttagagcgttttccctcgttttctggcttagctcctcataacggataccgcgtaattctgcgatatcttctgccacccgctttacataggctggctcatttcgttttccccgataagggtgaggagccaaataaggacaatcggtttcaattagcaaccgttcgatcggcacatgcgcagctacttcttttggccgcctagcgttcttaaatgtgacagggccacctaggccaatatggaaattcatgtttaagcaacggtccgctatttccacgctgccgccaaaacagtgcataatgccgccaacttcagctgctccttcttcctcaaggagatgaacgacatcttggtcggcttcgcgattgtgaataataatcggcaacttcactttttttgctaaagcaatttgtttgcggaacacttctttttggacatcttttggcgatttgtcccaatggtaatcaaggcccatttcgccaagagcaaccacttttggatgggctgatagctcttccagccagtgcaaatgcttatccgtcatatcgatggcatcgaccggatgccaaccgacagctgcatataaatcctcgtattgttccacaagttccatcgcccgctcaattgtaggctcgtcaaaaccaataacaaccatttctttaacgcctgcttcctgcgcccttgcaatcgtttcctgtacatctccttggaactgcttggcattcaagtggacatgcgtatcaaataacatcactattcacctcaaaggcattttatgccttttggctatgtgaacgcaagcaaagcaaaaaagtgggcttctttactatcttttatcgtctgctcgcatataggcaataacagctgttccaggtacacgaaaaccatttgctcaggcacacgtacttcgactgccatctgcgtattcgatcagtttggctgattgtaatagtggaatgactgccaaaacggccccgattggtcaatgatcggttcgatctcagcaaagggaattttaaaagtaggaaaaccagccgcataaggcgccagctcatatacatcaaagacaagatagagcgcatgctcatcaacatagaaaggttgggtgctgttcacccctttgtatgcatttggaaagtactcatccgcctgtttttttatttgttcgcctaccagtttgcttaaaactgccgcataatcacggccatgtttaaatagttccgacagggcataatcatggccattgcgtacgtccacattggcaaaagtccttgttggcatcccatgggccgcgccaaatggatacgtatagccatcgatttccaacacaacaaggtgttttttaaaaaagagaacattaaaatcacctgtaaacgtacgttcttttgtttccgcttctgtgacatgacgaacaccagcttgcttcgccaatttttgattgatggcctgttgttcgagttggttcgccattccttcaatttgcggataataaacataataattgggcccacgtttatacaggcgttcttggatgcgataaggacggcgcagtaggatttccgtgtctgggtgccaaatgatttttccatgctcatctgtataaaaaagacgctggtcaatgaatgccgaaacaatgccgttttccttccgaagtacacctgtaccagaaaaagcggggaatgtcttgactttgtggccttctctatcaataaaaaacgttctgtcgtccttcactgcgctagcagtgcctttgttaaaagagccaatatcatcataaacaaagtccgtcaataccgccccgcttgtattagcgatcgcataacggcttaaaaacggcctattggcgtccttcgctttcccaagcgcaatacgtccttcttgaagcaagcgtatttcattgtatataggttcaaagatggtgtcgcctgctttattcatcaacccataagaatagttgtcgtcactcgttgcgataatcgcaaagccatcctcataggcaaaagccatgccatatttgggcggaataacgacatttcctgcttcatccaaatagccataacgatcgccttccttaaaagctattcgtccttcgcttagcgatcccacatcggcatatggatatgtatgcagcacaagcccgttctcatcaattaactgaaactctgccgttttcgtttgcacgaccgcttttccttcgtgaaaatcataagcaaaaagataacgggctgctatcacttcctcgccatcagaattaagaaacccgtaacggccatttgtttgaaacagcgcacggctatttttcattggagccatgtaggcatacgtttttttcgtacgcacctggcctttctcatcaatcattttaaacccgtcttttgtttggataattgcccgttcttctgaaaaaggttgaatgcttttatagaccggctttacggcaaaacggccgaattgattaataagcccttgcttttcatttaatgtaacaatcgcaaaaccattcctttgaaaaggctctgctccttcataaacgagtgaaatgcggatgcgccctctgtcgttgatatacccccatttcgtgccatttaccgtcttcgtcgacacgggataaaggttctcagtcaatcgatccacgctaccaacctcctgcttcgcctggttggtccagtatatgactgcttttcctaagccatgtataaaaatggccgattttcatttggccattgccctgtgtatactgggtggtaagcaccagaaaaggaatggagggaaatgtatgcctacttcgtctaatgaacggatccttgtttgtgtcaattacggtcatcacggcagcaaactcattaaaagaggggccagtcttgcagcccaactaaacgcgcctttatcgatcctcgtgtttgattctttgccagaagaggagtataaacacgataaaaaaattgatatgtccatttttaaagaacttgctgatgaatacggtgctgatttgagtgtagagaaatctcatgcctacaatattacaaacgttatttcgaactttgcaaaagaaaaacaagcaacacaaattgtcatcggccaaattgctgaaaatttatggactgccctactcggcggttcgattattgacacgttgcttgaaaaagcaccgttcgctgatcttcatgttgtccctaaagaacgggccgatgaaacggataattggaattttgaaagaggcgtatctgcctatttggtggaacaaacagatggcacttatgaactgcgatttgacgacagcaaaggcttcacctatgaaggcgtcttctttaaagagcggcaaacggattttaatagcggcattttctctttcactaaggacggccatatatttgaagttcgtgttgacgatggcacagtccgccaactggtcgatatcgatgaaacataatcgtatgaaaccagttacttgccaatcgtcctctccatctaaaactaaaaaagcgccaaacgacgggcatttcccctttgtctggcgcttttactttggctgcttattgctcgtgtttttttcgttttgcccaggcgtatgaaaacgagccttcataacgagtggcagccccattttcaagccaataggtgacaggaaaaagtttgttcaaaaaataacggtcatgggatactgcgatgatcgtgcctgtaaactcagccaatgcctcttcaagcacttcttttgagtctatatcaagatggtttgtcggttcatccaacacgagcacattatgcttttcgaaaatcaactgcgctagccgcagccgcattttttcgcctccacttaaatcggcgacacgcttaaaaacgtcctggccataaaacaaaaaccgcgctaactggcctcgggcttcgccatctgctaaaagcgcactggcgcggaatgcttcgagcaccgtctgctttggatcaagttctgtaccatgctgggacaaatagcctagtgaaacactagcccctattttgcattgtcctgtatcaggctcgatctcccctaatatgagctttaatagcgtcgatttcccctctccattagcgccaacaagggccactcgttcttgatggcgcacagctaagtcaacttgaccaagcacttgccgttcgccaaatgtcttcgaaacggcttttagttcaactacatcttcgccactgcgcccttgctgctcaaaagacaattctactttcttcgtttgcggcggcttttttagctcttccatccgcgctaatgctttttccatgctcttagcctggcggtgcatccctgcattaggcggattcgcgcggttcgcccattctttcaggcgctttatcgcttcccgcattttcttcatctttttctgttgatccgcgtattgctggaattctctcatgaggcgttcttcacgctcttttaaatagccactgtaattggctgcatattgatgcagcaccccgttctccatttcccatatttccgttacagccgcatcaaggaaagcacggtcatgagaaataatgagcacagcccctgcataatggcgcacccagtcagcaagccaatcaaacgcgtacagatctagatggttagttggttcatctagaatgagtagttcaggcttttgcaacaataaacaggctaggccgacttttgtccgttcgccaccgctaagagccccccaccgtttctcaagcaaacccgtaatgccaagccctgcggcaatgcggcgaatattggcctcatattcaaagccaccaacatcagcaaactgctgctgtaaactgccgtattcctctaagacacgctctagcttggctggtttctgctcagttgcaagcacttcttccaatcgcgtcatatgctcttttactttttttatatcgctaaataccgtttctagtatcgtgtagacacgtctatcaggcgaataggtaggtgcttgggctaacatgcctttcgccagtcctttacgccagccgacctcaccagttgcagggggttctactccggcaagaatacgggccagtgttgtcttcccttcgccattccgtccgacgagaccaatgcgggcaccgcttttgatttccatggacaggtttgcaaacacttgtgtagcgccatatgactggctaacttgattggcataacaaagaatcacgtttcattcctcctattgatagtaggaagagacttgtgtacaccaaaaagacggcagagaaaattctccgccgcctcaatccgtatgcgagtagaaatgtctcttcctaatggtttttcctatgcagttgcgtaaaaaaggacagactggtccaattttgcaacaacagcggaaaaaatagcctgacaaatccacaaataggcgcgaaactttgcctggctgccattaaaaagatccatgttctactcacctccttcatcattactgttagcgtaatggaagaaggcaaaaatgtaaagcattctattcctaaaacgggaggtagttgcctttctacctctttaggtggtgctttcaaacaactttaaggagaaataaccccaactccggcgttcgcccgcaccacatccttcacttggtttacaggcgttgcttgatagctgtatggtggattataagtcgttgtcgagacagttggctgctcgccagtcgaagaaacatagcggttattgactagatgccaatacccgatttccttgctgtctcggctcacaattggattgtttgctctttcaaaatcgttctcctcgattcgtacttgagcgcccatgcgagaattgatccctgtctctctaatatctgcgtagtaattgctgaaaatatgggcttcgccaaagcgaacagaaggcacacgggaattcaagttttcaaagtaattattgtggaatgtaatttttcgtccatatgaatcgctgtcagacgaacccatcagcatcgacttccagctgtcgtgtacatagttccatgagaaagtgatgtaatcagcatcccgtttcacatcaaacaatccatcgtaataatccttatgcacatcaaggctattatagagttcgttatggtcgacccaaatgtttttggatgggccttcaatgctaatggcatctttatcgcctgtattcacatgatggattttcaaattgcggatgatcacgttattggcccgccacactttaatgccaattccgttaagttccccatttgttcctacccctaacaaagacacatcattgacatctttaatgtcaatcttgcttgcagatgtgtttgcaggcgtgattgttccgtttatataaatggttaaaggcgtgttcgcctttttattttttagtgcggctatcaattggtcaccggtggaaaccgtgacaacatctcctccagcgcctcctgtagtccctccattaagagtggcaaacccttgcattgagaaattcacattggctgcttccgccccttcttgcccatacgctggcatggaaaaagcaccaaacgccagcaaaaacacaaccatgaacgaccacaactttctcaaatctcatcccctgctttcctttattttttctactcaacaaccgacttccatccttgcctcctttcatttgtaaatcatgctcagtttattacacagcttgctataacgatgataatcattctctcagaacccatttaaagctaattgtccactggcttttttcgttactttctttctcggacaatcgagtcgttatcggctgttttaagatttttgtacaagcgctgccttcttttctagttgcaattttgtttctcaataggtagaataaatgctactgttaatttaaaaaaataaatcaacgtgcatattgacaaaaatgagggatcgttatgcaaaattatgaagttatggatattacgttaaaacaacaaaaaatcatatccgatcctttgcgtgggcaaattatcagtttgctcgcagaaaagccgatgacttcaaagcaaacagccgttgagctaggaaagaaccctggaacaatttattaccatattaagcaattgtatgaacatggcattctggaactcgaccatgtggaaacagtaaaaggaattgtcgaaaagtattataaagcgaaaacgactttgttcaggggacctgggggaataggggaagagcaccgtgtgaaaaatagggtgcctttatacttgtccgatacgttaatggatgacatgcaggaagagatgtaccagctttttaaaaaatacggcaaaaaagcacgggccgataaaactgcgaaaatcccttgcatcgttgaattttctatcacggaaatacaagaagacaaaaatgagtgagcgtgacagcactcacaaaagaaccagtcgccggcaactccggtcaactggttcttttctttatgattcgttattttacttgcgccccgtttggcagatcaccatcaacggttgcgagctgcagtttctttccttttgagccggcgaggatcatcccttgggacaattcaccgcgtagtttaacaggctttaaattcgtcacgcaaatgactttttttccaactaaatcacttggtgcataatacttggcaatccctgaaacgacttggcgcgtttccgtgccgaggtccaactggatttttaacagtcggtccgcaccttccactggctcagcagcagtcacttctgcaaccttaagctcgacctttgaaaaatcgtcgattgtaatttcattttcatcttctatttcctcaggttctgggtcggccttgccacccataagctcgacaatataatcgacttctttttcgacatcaaggcgtgggaaaacaggctcgcctttgctaacctttgtaccagccgggagttgcccaaaaacgcggatcgattcccagccagcaagactttcgtcaatgcctagctgtgcccatatttttgctggcgttcgtgtcataaatgggcggatcagcacagaaatgatccgaagtgactcggctaagtggtacataaccgaaccaagaagttcgcgattatcttcttcttttgctagcatccatggctgcgtttcgtcaatgtatttgtttgtacggctaacgagttgccaaattgcagccaaagcaatcgagaactccatttcctccatcgcgtcttccacttttgtaatcgttgcttggacaaggtcaagcaaatcctcgtcaaatggcgatgcacttttgacgtaagcagggatttcgccattaaagtatttattgatcatcgctacagtacggttgagcaagttgccaaggtcattggctaaatcataattgactcgttctacaaatgcttccggcgtaaagaccccgtcagcaccaaacggcacttcccgcagtaagtaatagcggatcgcatcgagaccaaaatggtcaattaatggcgcagggtcaaccacgtttcctttcgactttgacattttgccgtccttcgtcaaaaaccagccatggccaaaaacttttttcggcaacggcaaatcaagcgccattaacatgatcggccagtaaattgtatggaaacgcaaaatatcttttccgaccaaatggacatccgcaggccagtacttttgataaagggtatcatctgttgttccataaccaagtgccgtaatgtaatttgtgagcgcatcaatccacacatagacgacatgttttggattgcttggcactttcacgccccatgtaaaggacgttcgcgaaacagccaaatcttgcagacctggtttaatgaaattgttgatcatttcattttttcgtgatgctggctggataaagtcagggttctcttcatagaaagctaggaggcgatctgcgtatttgctcatccgaaagaagtaagatttttcacggactttttcgactggatggccggagtctgggctttttccgccgataatgttgcctgattcgtctttaatagggtcaacaagctcccgttcaccataaaacgtttcatcggacacacaataccaaccttcatactcgcctaagtaaatatcgccttgttcaacaagttgttcaaaaattttctcgaccatgtttgtatggcgcttttccgttgtacggataaaatcatcgtgtgaaatgtcaagtttcttccataactctttaatcggttttaccatttcattcgtgtattccagtggagaaattcctttttccttcgccttctgctcaattttttgcccatgttcatctgtccctgtcaaataacggacatcatagccgcgtagccgtttgtagcgtgccattgcatcaccagcaacggtcgtataggtgtgcccaatatggagcttgccgcttgggtaataaattggtgtcgtaatataaaacgttttttcgctcacgcttattcatcctctctctttttgaataaaacaaaaaacctctcgccgcatcgggacgaaaggtttgctcacgtggtaccacccaaattttcctcatcatgggacaaggctcaaagccagtaacgttggcacacgctgcccccttacactcggctcgaaggcatgtatctccaggaccatcttccaaagcgcgccagtccggctttcacctaacccggctctctatcacaagcgctctctttgtactcatccgttcatagacattcgatttatcttcattcttatccaaaatatagccaatcatacatcactttgtcaagcctggtcatacaacgtcgcaaatggcgttttctcttttttaagctttccttccctgcataaacgttcaagttcttctttccactcagagacatcccatgctttggacgcttgcttgtttaatgcatccagcttttgcatcacgtgcatttccgccattggcaaaaagtccgctaaagcagcaatgatttcttcatcgtctgttgcattcatttgctcaagctcatcaaatggattcatcgtatggggactcgttgaatgggctagccgaatccgaaccgccattgtccggccgataatcgccgatgaaacaaagacatcccctgaccgcaaataaggaagacgcttgccttcttccgctgttaagtcggtttcttccttaatcgtttggatgtccgttccccgcactgtacgaaaaacaaattttgaattgagctgtgccgtaatcgtttcgtcgagcaacgttggtcgttgcgttgcgaagattagaaacgtcccatacttccgtccttcctgggcaatttcctttaacactgacttggctggcgcatcaaagcctttcggggcaaaattgtgcgcttcatcggtcacaatgacaaacggcggaaaaaattgggcttgttgctgctggagcttcgcatctttgtaagagcgtctttttgaataaagcgtgccaatgacatagctggagaacacttgcagcaaccaaacagctccttggacgacaacaagcttgccactatggatgccgtgctcaatggcacggatattttgttggaaaagccctgcttgattgagccggtgcaagcgccattggattccttttacagaggacggcggcaaactgccaaactgatctaacaactttttaaaggtgccgtatctagctatttcatctcgtgacatgccgccgtcatggagcataccgtctattttctgtttgcccatgtcaagtgcttctattaaattggcaacgcggtcggaaaacgattgataactgtctttctttttatggagtgtttgcacgacattgaccatcgattccgttaacgatccggcagcgccaaggagcctttcgatgtcccgtgtcgacaaggcggagaaatcaacgccgacatcgcggccgatttggacgacttcatagcgtgagtcgtaatcaacctgacctttatgagcttcggttttgcctgaaaaattcatttcaaaatggggatcaaacacaagcgctggaatttttaacttcattaattcctcaagcatcacccgcaaaccgaatgacttccctgatcccgagccaccgaatacgccaatatggggatattgctgcatcgcgcgaatgtcaaaaatgaacgggacaccctgttgcgccgttgtctttccttgttcgtgcataagcataagcccttgtaaacgctcaggaatcgtttcggcgataaagtcagttgacttcacttcgccgagaaccatccctttctctggccctgtcgtcaacagcaaatgctcgatttcactaaacttaggatggcgcactgctgcacctgtttggattggcttttgggcctcttcaaataagcgcactttggctagatggatatcgtcttggccaatatcgtatccaatcgcttcgagtgtttccagtacatcgcgatcgactaaccctttgtccattcccattggaatatagcgattgtaggaaaatgtttcgacgacttccccttttggcttaaacagttcgtcgtcttcaatgactaacatttcattcatgcggaacttatgggtttttgaagcaacatggacttcatgctgcgtcgtgacaccaaccacttgcatcgttgtttcctccttttaataaggcctgctttgccgcatttttgtaaaaaactgcttccgaacatcgggatctaaatattgttcaaccaacccttcgacaagctggtccgttatgcggatttctttgtcaatgtaatcaagccaaagaggaatgccccggccttcttttggggtgagcgtacaaagcaaatcgccgacaaacgccatatgtgacgcttgttcttcaagcatatcaaatccggtgatcgcaggcgtcgccccaagcctcatccaaacggacgttaagcctgctttatgttggatatcttccaggtaaaccatttcattttggtttaacacgccaaacagcaagtctctgtcataagaatacgggttcttcgcaaacggggcaaaagctggcaattgaactaagttttccgttgtgatttcttccgaaacgccaacaagcaacgtatcgttttttaatgcaagcgcccgcaacgcttcccattcctctggcgcgtcaatccgataatggtagagggccccgtccatgagcatgacgcggatatcttctgcttcaagcaagcgggtagccgcttcaagctctaacttagcaagtaaatacgagcggcgattgcctgaagactcatcttgttcctccaacaagggcacatacaaatcagaagcccattgttccttaccatctgttgttttcgctaacgcttgaaaaaaataaaggacatgtggcggctcgccatttgtttggttgaccgagccgtcagcgccgccaattttccgcccttctaaaagattaacgaggtggcgtgccgaaattgtctccatttgtcgaataagcgttgccgacttcctcaaattttgtcgaatcaaatctttttgactatgactatttgaatactgctttcttaaaaggttgttagattgctttaatttggaaattatttcttcgcttaaatccatcatttctttccccctttctgagatactaccactgttaaaccattgctattacaggattattctttccaatgcactcgcggggcgcacaagttttcacaaaatatgcgattttttatataaatttgtttgacttgttttggaaatattgttattcttagattactatagaattatgtcgaattatgacacatacagagtccgtttatttttcgtaaataagcgcacaccaccatatttgaggaggaaatctaagaatgaaatctacaggaattgtacgcaaagtggatgaattaggtcgtgttgtcattcccatcgaactgagacgtacattagaaatcgccgaaaaagacgcgttggaaatttatgtcgacaatgaccgcatcattctcaagaagtataaagctaacatgacttgccaagtaactggcgaagtgtctgatgacaacctatcactcgcaaacggcaagatcattcttagtcctcaaggtgccgaagcaatcattggccaactgcaagaatatgtcgctaaaaaatcataagcatgatgcttttaaaacctgcctctttatgtggcaggttttttgtttttagtgctgatggtacgtttggtaaatttgccgtttcggaacaccacgatcaacagctacttgcttaatcgcgtctttttggcttaggccaatggcgatataatgatccacatgcgctgtttcactcaacggtgcccaccattgttcttgctcttcatttgcctgttggcttgccccttcgacaactaaacaaaactcccctttgatcgtccctgtttcggtccaagcgaccgcttcacttaggagaccacgctgatactcttcaaatttcttagtcagttcccggccaatggcgatttccctgtcgccaaacgcttcgtacatcgctgctaacgtctggctaaggcggtgtggcgcttcgtaaaacaacatcgtttcatttgctgtggccaaacgggctaacgcttccttccgatcttttttcactcgcggcaagaaaccgtggaaggcaaattgcttagccggcaagcctgaagcgaccaaagcagtcagggctgcatttgccccaggcaaagcgacaacgggaatgcctgcatcaatgcagagcttggcaagcgcttcgccagggtcagaaattccaggcatgcctgcatcactgacaagagcaattgtttttcccttttccatttccgctaaaaggtcagcgccggcttgcttttgattatgctcatggtagctgactagcggcgtatgaatgtcaaagtgagccgtaagtttccgagtttgccttgtatcttcagcggcaattaaatcggcttctttcaatatccgaattccgcggaatgtcatgtcctccaaattgccaattggcgtcggcaccaaataaaggcacccatccgtgtgctggaaacttttttgctctttcatcgtccttcctcttttcttcgcatggctatgtaaagctgtttttcctttttggatagttgtttaaaggcatattcgcagcgcatcgcctcttcttttgtggggaattcttcaaagaatacgagcgtaaacggccctcttccccgggtatactttgcccctttgcctgcttcatgcatcgctagtcgtttttgcaaatctttggtatacccggtgtaccaactgccatccttgcactcaagcacatacatcacatgtgtcatcttccaaaatactccctttgaaaggctggcgtatactcgtcttcattataaacaattaacggcggttcacaaacaagccctggcttgccaccctttgtcccttccaaaaggacgatgttggcgtttgcttccccccgagggtggcaaaaacagagtcgttttggctcgatgttgcatttacgcatctcctccatcatgtccgcaagccgttctgggcgatggacgagcgctagcttgccgccatatttcaatgcataactgcctgcttggacaacgtccgccaacgtgcaggcaagctcatggcgagcgacggagagagcacgctgttcttttacttgcttgtttcctccaagttgaaaataaggaggattgcatgtaactgtatcatacgagctatgggcaaggttgttttttgtgtcttttacatcaaaacatagtgaagttacttgtttttctagttgattcacgcgtatcgtccgttctgccatatcatgcaatcgcgcttgaacttcaaccaaatcgatcaatgctttcgtgcgagccgacagaacgagaccgacaatgccatttccgctgcacaaatcaagaatacgccccttttggatgggcacataagcaaatcggccaagcaataccgcatcaatcgaataagcgaatgtctggtcactttggataatcgataggttgctgccagccactttgtcgagccgttctccttgtaaaagcatggcccctcctttatcaacgaaaaagtcggctacccgaatagatcgtccaaacggagccgacttctttatttaacatcttgatggttgcacgtgcttacttttggtgcagaaaggacaggcaaaacaagcagtcatccccttcaggccttatactgccgtaatgggtgttgcaaatatggaatccttcttggtacaaacgggccaaattttcatggccttcccccaccatttttttgcgtgagctttctcctgagggcgtaaccgtgtttttcgtcccagcttctggttcaagccgtttacggagattttcattttcgacatgcaagtaatggttttcttcaattaagtatgccagttgctcttttagccctcttagttcgtcatgaagatcccctatccgctcttcaaggctcgagacttgagtgaatatggcttttttgtccacatggttcacctcgttattcagttgcttccgaagcgactgtctcctttctcatcagttcttcaaaagcatactccagcgtttgctgttcttctgccagttggacttgaacgattcggtcaagcaaatttaggccaaccactttgcctttgccatcaggcgtaacaatcggcttgccaatgtcaggcatttctttcttagcttcctcatatgtgtcattttcatactttaaacaacacattaaccggccgcaaagacctgaaattttcgctgggtttaacgataaattttggtcttttgccattttaatcgagactggctcaaagtcgcctaaaaacgttgaacagcaaagcatccgaccacaagggccaatgccgccaagcatttttgcttcgtcacggacaccgatttgccgaagctcaatccttgtccgaaaaattgctgctaagtctttaacgagctcgcgaaaatcaattcgcccatcagcagtaaaataaaagagcactttgttgcggtcaaacgtgtattccacatcaacaagcttcatgtctagttgatgttctacaattttctcgtgacatgttgcaaatgcgtcttcagcggcccgtttgttttctctcacagtttcttcgtctttgctagtcgccacacgcatcactggctttaatggcaagacgatgtcctcttcattaacaaactttggaggaacgacaattttcccgtactcaacgccccgggacgtttcaacaataacagcttctgcgcctgtaagctgaaacgggcctggagagaagtagtaaattttgcccgcttttttaaaacggacacctatgacctcgtgcaaaacttagccctcctgtatggtgaaaagcagccgttccatcactagttggatggaaacgttggcgctaagatgccttttcgcttcaagcacatggctcatcgctgcgcgaatggtgtgctgtgatgtagaaagcgccagctcatcaaatttgcttttgttgtcagcatagacaagcttatcctgctttccagcctgtatatataaaaggtctcttaaccaaagtaacatcatttcaagccccatttcttgttgcaaccgctccttcataagcggaatccacttatcagcaagtgtgattgcagcaaggtctggccttgtaaaaagctcatgcatcaattgtaacactacggttcttgcttgaaaagaccagtctccctcggctagtgccttcgcgtaagctttgtttcctgttaaagcagccaaaaacaatgcctgattttcttcgattccctcggcaacaagtttgcttgctatttgcgtttgcgaaggcggcaaaaaccgcatttgttgggcgcgggagcgaattgtcggcaaaatgcttgcgccgttttccgtcaaaaggatcgccaatgtttggccttgtggctcttccaaaaacttcaataaactatttgcagcgcttgcggtcattttatccacgtgggagacgatatacacttttgcagcagactccatgcccctgtacgtaaattctttttgtaagtattcgatctgttcttttttaatcgattgtccgtccggtgcgacttggtggacatcagggtggttgccatgttcaatccgcaaacagtcactgcatgcatggcacggctctgccccgttgtgttccttgcagaaaaaacgtttcgccatcaacaaagccacttcatgtttgccgcttccggcttccccttcgaacaagtaggcgtgggccaagcggtttttttgaatgctcgcaacaagcataggcacaacctgcggctgtgcctcttgccagtctttccatgtatccacgtgtctcacctgctcttaaaattgttcaaattggtctacaggaagaacaaagacggtagcgcccccgacttgtacttcaacagggtaaggaacataggaatcggcatttccgcccattggcgaaatcggcgctaccacctgttcgcggctacggcaatttttttggataatctccataacatcttctactttatcgtcatcaacgccgatcagaaacgtggtgtttcctgccttaaggaatccacctgtgctagaaagtttcgttgcgcgaaaatcggcttttacaagcccgtcagacaaacgcgtgctgtctttatcttgaactaccgcaataataagtttcatctatcgcaccccactttttgtttagtctttagtagacaaaagcattcggttgatttcttccattgtatcatgaaacacttctgcaaaagaacggttggcatcaatggcctttattcgctccggttcagcctttagcagttttttgtaaccttcctggacacgcttatgaaaggttagcgtctcttggtccaagcgattccaactgcgtacagcgtccttttgcaccctttccagcccaatttccggctcgacatcaaaatacaacgttaagtctggcatatacgtctcgatcgcaaagccattaatagctctaacttcttccattcctattcctcttgcatggccttggtacacaaggcttgaatctatataacgatcacataagacaagggctccctccgcaagagcgggaacaatttttttgatcaaatgctctcttcttgcggcagcgtaaagcaatgcttccgtgcggttatccatttcaacgccttgcgtatgcaacaatagatcgcgaatttgttcagccagctccacgccgcctggttctcttgtgcggatcacctcgtagccttgagtggcaagttgctcttgcacaagattgatgatcgtcgttttaccggcgccttctccgccttcaactgtaataaacagcccttttttcatgtctaatcctccggcatttgtacacgtaatccatgttttgggtccagcccttgaaagcggacgcttgcttcaagcagttgctcaatctgcttaacatgggcaggggccacctgttctcctcgatacaatagaggaactccaggggggtacgggacaagtggctcagctgcaactctgccaactgcttcactcagcggaaccgtttctgagctgaagtcgggccgtttcatgtctatcaattcggaaatgagcggccctgctcctgcctggaacaggccttttttcctctgcttttcgggctgccaacaacgtgtcgaaagccgcgaatggaacaggctagcatcgaactcctgtccaacccctagtacgagaaggatagcgtttggatcagccatctccgcccaaatccctgcctttgccaactcttgaagcagccatgtaccagaacgtgaatcatttgcttttattgtaacctttaacgggtcattttggtagcactcgcctgcattttcgacaacttccagcataggatggctgcctatcgcctcttgcaaacgttggctggcgcggcatgctttagcaaatgctgcttccccttcgctttcgatataggcacgtgccccatctaatgaagcaagaagcaagtacgacggactgcttgactgcaccatcgttaacgctcgtttgactggctccctaatagccgcagtcgtctcttttgcaaaatgcagccaagcccccattgttaaagcaggcagcattttatgggctgattgcacgacaacatccgctcccatgtcaagtgcttgtttaggacagcgcccttcaccttctcctagtttaaaatgcgctccatgtgcttcgtcgacaagcacgagcaaacctgcctcctttgcctgagcaaaaatagctgcttgattgcgaaccgtgccccaataatcgggataagtagcaacaagtgcttttgcaccagggtgtcgcctgagcgcttcttcaaaaacattagcagtcaaccctagcggccgccctgtctttttatcatattcaggggcaagaaaaacggcttttgctcttgccaactcaagcgcatgcaaaaccgacttgtggcaattccgttgcacaaaaacaacgtcgccttctttgcataatccgtaaatcattgccaaatttccactagtagaaccgccaaccaagtaacttgtttcgcctgcaccgtaaaaggctgcacaaagcgcttgcgattccgcaattgggcctgtggggtcatgaaggtcatccaacccttctagctccgtaacatcataggcaagcacatgctgaaaaggcgccaagctttcaggccagacagcgccatttttatgccctggcacatgaaaagacaaaggctgtttgtcgctatgtcgttgcagtgcagctataattggtgttcgtgctttcatttaaattccccttctatgcctcgatatttcttttatatttgctgcatatcactatttttcaaacctgttcgctaacataaaggaataaaaaaagccagttacggctaacatcaactggccttctcaccattctattatagcgaatggcgcatttttcaattccacaatcgttttaacgcatctacgcatgtttgataagcgtcttcgccaggttccaatcgcatgatctcttgctcacagtcttggcacaaaaataacgatcctaatgacaaacccgcttctttcatagattggcagacgccacagctacgctttcctttaatataaacggttttcgttgttgttgccacctttatgccacctccactataagtgtcgccataaagagtgcctttatacatatagacgtttatccatcttatgaaaaacaactcgaattggtgtttggccaatgttaaacatgatctgcgacaaccgaaaaatcgatgacttcataagttttgacgaacgcctgcaattttgtggaaagatcctcctgaatcgtatcgaaataaggcttgccgttaaccaaaggcgctttggcatataattttcttacgctgatcgggatgcctgatccgctcgccccttcacgcacaagaagtttatggggttcttcaagcaacgtacgtatccacattcttgcccgtaccgatggcgatgtttttaagacggacaggacgtcccaatccgttagttcagcaaacacatcgcggtcatcgccaacttccgcccagtcacaaagaatcgcttcggcaaggactgcatcagctgcaagcaacgttggcgcgcacatccattcatgggcacggacaactaattccatcaactgtaatgcggtttcttcgccacatgccactcctgattccgtacactccatctgtttaaccagttcccacgggtggacacgattcgtgccagccatgtacgtatcccttaaaaagctgtccaagtggtccaaccccattaccgtatgtgtgcctgttagtggcccaggatgatcgagataggccataactttatccaaatcgatatttgcttctaataacacagcggtaataaggggcgagtgaatgcgcttcgccgtcaactcatgatgatcaaaaccaagggctttctcgacactatgggaaaagggcaaatgcccaatatcatgcagtatcgatgcaactcgcaattcgttattatctggttgaaaatgggctgctaatttccaaacgccgaccgtatgttcaaaacgtgaatgcacaacaggagaaaccaatgaacctgctccgtaatgggacaacaactttaaccgtcttacagcttttaattggaataattgttcttcatgaggcaatcgggctatttctgggtaaagcggttcggcaaattccttcattttgcgcctccctttttctacgtatttttattataccattcattgtttgcctatatgggaatagcgacttctagtaccatggtggaccttgttattttaactctggcagtacgaaccgtctgtcgatcgggcaaaaaatcgagaagcccgctgctttccattagactatgcctcttctttaccgtttggtgaataaaaaatggttataaacatacgaacgcaaataaacagcaaaaaaccggcgtaatagccgagtcccgtggcatgtatgatggtcgcaaaaataaaaagaaggagaaaagcgtagatgatcgcttctctcccgaatttacggtttaatccatattgacccagacactttttacttccgtataattgtctaatgcatagcttcccatttctcggccaatccccgattgtttgtaaccgccaaacgggctggctgcatcaaatacattatagcaattcacccaaatggtccccgctttgattcggtgggcaatgtagtgggcttttttaatgtcttgtgtccaaacaccagcagctagcccataatccgaatcgttggctttaccaattaggtcatcgacgctttcaaacggcatcgcggccacaaccggtccaaaaatttcctcctttgcaatcgtcatggaatgatctacgtcagcaaaaatagttggggagacaaaatacccttggtcatatggaatggtcccgccggctaatagctctgccccctcctcaacgccacgatcgatataatttttcacgcgcttttgttgctgagtcgaaatcaaaggccccattgttgtgtgttctaacagcccatccccttgattaattttctttgttaacgacactaggtcagcaacgacatgatcgtattgtttcttttggacatacaatcgactccctgcgcagcacacctggccttggttgaacataattcccataagtgatccaggaacggccttcgaaagatcagcatcaggtaaaatgatatttggagacttgccaccgagttcaagtgtcaccctcttcaaagattcactcgcttgtttcataattaattttccaacatttgtagagcctgtaaaagcgactttatcgacagctgggtgattgacaattgctgttcctgccgaatgtccaaatccaggaacaatgttgacaaccccttttggaaatcccgcttcattgatcaattcccctaaatacaaggcagacagcggggtctgctcggctggttttaatacaaccgtacaacctgtagcaagggcggcaccaagtttccacgcggccatcaataatgggaaattccaaggaatgatttgaccaacgacaccaattgcttcatggcgcgtataattgaaataattcccttgcactgggatcgtttgtcctactatttttgttgcccatccggcaaaataacgaaaatgttcaatcgttaatggaacatccgcattggccgtctcgcgaatcggcttgccattatctaaagtctctagctgagcgagctcttctttatgctcctctattaaatcagctagtttgtagataagacgacttctttctgccgcgctcatttttgaccaaggcccttcatcaaacgccttccgtgcagctttgaccgcagaatcgatatcctcttgtcctgcttctgccacaatggccaatgtgtcaccagttgctggattcatcgtctcaaacgtttggccagatacggcatcaacccattctccattgatcaatagtttctttgatccgccgtttaaaaacgacactaacctagtctttaagctgttttcgcctgttggcacttgtgacattgttttccctcccagttaagcggtttcatcaattgttaacacaacacgaccgttaatttttccattctccattctttcaaacacttcgttaattttatcgagcggctgtgtttcgatgttggttcgcactttcccttgtgctgcaaattcaatcgattcttgcaagtctttgcgcgtccctacgattgagcctttcacggttacaccgtttagcaccgtatcgaaaatcggaatgggcaattcatcgtttggaaggcccacaacgactaatgtccctcctcttttaacagatccgtaagcttgctcaaatgctttttttgtgactgccacgctaatagctgcttgaactccgcccactttttcttttatttcttgaacagggtctacctgaagtccattgactgttaaatcagctccaagacgttttgctaattcaagtttgtcctccataatatcgacagcgacgacgttatagcccattgcttttgcgtactgcaaagcaacgtgacccaatccaccgattccataaatggcaacccagtcaccggctttggcatcggctacttttaatgctttgtaagtcgtcacccctgcgcaaaaaataggggacacttcagcaaaatcaagattctcaggtattttcactatataattggcaggcgccttacaatactctgcatatcccccatccactgaataacctgcatttaattggtcagggcataacgtctcacggcctgttaaacaatactcacactctccacatgcagagtaaagccacggaatgccgacccgatctcctacctttatcgaagtgaccccttctcctatttcctctacaatacctactccctcatgaccaggaataagaggaagctttggctttactggccaatctccatgagcggcatgcaagtctgtatgacaaacaccgcaagccttaattttgacaagcacctctccatactccacggtaggtaccggaacttccttaatctctaattgttgattgaactgattaacgaccgccgctttcatcattcttcgttcgcttgttttactcatgtaaaaacactcccctcattttggttacctttataaaagcaagaaccatgccaatataaaagcgctttctttttcagcaagtctcttctctttgggccaaaaaatcggctatttttagccaacttgacggacaaaacatgacaattttccgttaaaccgactcaaacgggactagccaaaaaaagaaccccttaaaaaaagagttctttggctgctattccgtatttcgtttttcatttaaaagatatcgaagttttctcatcgaaatttgtagccgtttcgccgcctcttttcggtttccatgggtggtttctaacgtttgtagaacaagagctttgccgagttgtgactccaactgtttaagctgggcaagaacttcttccaaatttatcacttcttttttcgagtaaaagcttaaagcgtcatcccgccatttttcgataaagttgtccatccccgtccccggcgtttcggtatgatcattagctgttcgcttctttaaagtgacagaacgttgctttgcaaaaggtagatgatccgcagtgatgttcacatgacctgaatcggcaaacgtgacgatccttgtaatgtagtttgataattctcgaatgttgcctggccactcgtagctttgcaacatttctaaagccccatctgaaaaagaaacttccatactaggatatcgttttaaaaagtgttcaattaataagggaatatcctcttttctgtccctaagcggcggaatttctaaatgaaccacgtttaatcgataaaataaatcttctctaaattttttctgttgaacggcttcttgaaggtcttcgttcgttgcagcaagcaagcgggcgtttgtgtgtagcggttgctctccacctacacgcataaactcgcgtgtttcgaggacacgcaaaagtttcacttgaatcgaagtggatgcttccgctatttcatccagaaacaacgttcctttgctggcaatttcaaaaagaccttttcgtttttgtgtagctcccgtaaaagcacctttttcatgtccaaaaagttcactctccaataaagactcagacagtgcgccacagttcactccaataaatgattcatagcatcgttgactcgcttggtgtataaaccgtgcgaacacttcctttcccgtccctgtttctcccccgattaacacattcacatgtttcccagctactttataagccgtttgaatcacctgtctcatggcctcattatgtcccacaatcaggccaacatttgtcgccagatcgagaatccgctgctcattagacgtcccgttggcaacgagcaagtcgtccacttgtttttctaacaaatcaatatcatcaaaaggcttttctatgtaatcactcgctcctagcttcattgcctcgacagctgttttgattgtactgtaccctgtcataatgatgactttacagtgtggttgtctccttttaacatgcttaagtaatgcaagtccattcgcatcaggtaactttagatcaatcattgccccttggaactgatggtggtcaaaatcaatcgcatcgaattccttcttactgtttacaacacgtaccttgtacccttttgatgtgaacaagtgggaaagaaagttgcctacctccacttcgtcgtcaataattaatatgcttgtcatatcgttcctccaaccttatcgctagctgttggcaactttaatataaacgtacttcctttattccatttgctgtgaacttcaatcgttcccccatgcgatttggcaataccaaaacttacagacagccctagccccgttccttcttttgacgatttagttgtatgaaaagggtgaaaaatttctgagagccgttcttcttcaattccgattccgttgtcagtaaccgataaatggacttcatggaattgaaacgacgtcttgatgagtatttccttcttttccctcaatgtttcttctaatgcagccttagcatttaataataagttgataatgatttgttcaatctgcgcttggttcccttcaatgaaagggatgtctttttgtaattctgttttgattattactttttctttttccaactgatactttaacaggtttaatgtttcattcacagcatcgttgatggaacaagactcaaacacaaaatcgtcctgcctcgaaaaagtaagcaagctattaataattcgtttgcaacgatcgccacaattttttatgtcggttaaaagtggaaacaacgaatcatgattgttcatatttctaaggataagctgtgaattccctaaaatggccgttaacgggctgttcaattcatgtgccactcctgctgccatttcaccgatagccgctagcttgccagaatggatgagctgtacttccatttttcgcttttccgtcacatctttgatataagcaatcaccccatacatcacctgctcgttattgagaagggggtacgtagaaagctcacaaatggtttgattgcggagatggatttccttatggcctgctttttcggagtagaacgtttccttaacaagtggctcacagtgggcaaccaaagcagaaatatgggttaattcgtggttctgaagaaactcatgaaccgcatcattaaattgaaccacgtttccttcttgaccgaaaacaacgatcatatcatctactgctttaaacgtatcttcccactcttgtttcgatcgtaaaacttgaccatataattcgacattttcgatactaacggctaaatgatctgttaattgctctaaaaacgctaggtcgtcagagctccagtctatttcttgtttccgaccgatactcaatacgccaatccgtttgtttttactgtaaatgggtatgactaaaatggatttaagctcaagtacagctaaatatggtttctcgtaaaaagcgtgattcgtatccgttaaactttggagaaccgtttgccttttgtctaatgctgaccaatagagggactgggcctttggaatggttgagccaatttctaacgaatagtgatcttcaggataaacatgacttaatcttaacgtttcatttgttaacatcaaaaagctcagtcgatcaaagtgaacaagcaattttagtttatcaatcatattaattaaaatatcatctagtgacatatcgaccttaatgcttttcattacttcatttatgatctctaattgaatgttttttttttcagctgttcaactgttttctttaattctgtgtagtatgtttttttggatgaatcaacacctgttaaacgagcaatcatcgcttgtttattatccaacattagaagtcaccacctataaaacatgatttaatacttgtttcacttgctcaatatccatgtcacggggattcgtaatcatacacgcatcttctaacgccacttggcttatatgatcaatcatttctgttaacccgacttgtttaaacttggttggaatcccaatatcagaggatagttctttaacggattggatcgcagcattgcctgcttcacgatcggtcaatcctcttgtatcgatccctaagcatgtcgctatgtctgaaaatcgtttaggtgctgcgataaaattaaaatccatcacatagggcaaaagaatcgcattgatctctccatgcggcaaaggaaacttcccccctattgcatgtgagatcgcatgtgctgcccctaggattgcatttgagaaagcaagccctgcctgtaaactagccattgccatcgcttccttcgcttctttatttgttttcgaggcaacagaggggcgcaaatattgagcacacaaggtgagggcatttttcgcttggacatctgtaagcggagtagccgccacactgacataggcttcaaccgcatgcgtcaatacatccatccccgttgtagcagtgaggctgctgtctttcgtgacgagtgtaaaagggtcaataatggcgatatcaggcaccaatgttttcgatatgatcgtcattttcttttttcgagtcgaatccacaatgatggaaaactgcgacacctcagagccagatcctgccgttgtcataatcataatcatcgggggaaggggttttttaattttatcaatcccttcataatcactaatcgcccctccgttcgttgcgagtatggcaatcgctttcgctacatctaacacacttcctccaccaatcccaataatcgcgtcacactcatgttgaacaaacactcggcacccttgctcaacttcgcgatctttcgggtctatcgtcacgtcgataaacgtggcaaagggcaaatgagactctttgcaaagatccattactttttctagccagccggcattagctacaccattatcactaacaattaatacttttctcgccccaagccgcacgcaagcatcccccgcttgccttatcgcgtcactcccaaaaataatctctggtgttacgaatttattgatattcatcccaatctccttatggaagttcttatggaagttgattcttataaatttatagatgctgttcttaaattcctgcttgttatttttcaaatgcctgtttaattatgttcccctaaagggactatactccaattaacataacattaaaaatattaatggatggcgttatcaagttgcaagaagttattaaagatacttatttaaatttgagatcgagtaaatacaatgctaatgctggtcgactacttttctaaagcagcactcttttgcttcctgcccatcacaaaaaaagacacctattcaggtgtctttgcttagcccggcaacgtcctggctccgggatcttttcctacggggaagtggggcatgaagctttttcacgatgtttttcatgttgttttacgaaaatgatccctacgtctcccaggagggcacgaggcttttccagtgaagcctattcacgtagttttttatatgagcttatctccatatactcctaataagcatttaactctgcttcttggaagcagcactcttttgcttcctgctcataacaaaaaaagacacctattcaggtgtctttagtatttgcccggcaacgtcctactctcgcgggaggaagcctccaactaccatcggcgcaaaagagcttaacggccgtgttcggcatgggaacgggtgtgacctctttgccattgtcaccggactctacttcagataagcttcggatttcttcgtccagttcgtgtctctcagtcggtcacgtacgtttgggtacgctcccttcttcgagcactcctgtcctcgaactcctcgcttctcttcgtagttctcagataagcagcgaatctcttcgtctgcactgaagggtatggaaagaatcggtgattctttcaaaactaaatccgaaatagactcaattgtcaagaatgtgtataggataagtcctcgaccgattagtatcagtccgctccacgtgtcgccacgcttccacttctgacctatcaacctcatcatctctaaggggtcttactggcttacgccatggccggatcgaagcttacttacagctccccgaagcctatcgcggttcgtcgcgtccttcatcggctcctagtgccaaggcattcaccgtgcgccctttctaacttatccttttttgcttcagatcagcgacggatctcttcgtccacttatgttattctcactcggtcacgtacactcgtacgctccctccttcgaaaacgtgtgtcctcgatctccttgctgctcttcgcaaaaattaaaaaatacataaaaaggtatgcattgaattcttgacgtctttttgcttcagataaccttcgtatctcttcgtctggttcatgtttctcagtcggtcacgtacctttgtacgctccctccttcgaacatttcccatcctcgatctactcggttctcttcgcaaaaataaaaaaatacataaaaaggtatgcattgaattcttgacgtctcgttcaaacagttatacaaccgatgaacaaagatcaatttgagttatttctggatttagttttcaaagaacctgagagtattgagtcctctcaaaactgaacaaggctactgatttcaattacatcatgtaacacttctcagtttatgcttcgtgctgccttgcgacgagtaaccgcaggagcaatagcatttaatcgagagttttgagtnnnnnnnnnnnnnnnnnnnnnnnnnnnnnnnnnnnnnnnnnnnnnnnnnnnnnnnnnnnnnnnnnnnnnnnnnnnnnnnnnnnnnnnnnnnnnnnnnnnncgcaggagcaaaagcattttaatcgagagttttgagtcctctcaaaactgaacaaatagcctaagcgctatatgaccagaaggtcatacatcgactagagtaaaaactccatagaaaggaggtgatccagccgcaccttccgatacggctaccttgttacgacttcaccccaatcatttgtcccaccttagtcctctcaaaactgaacaaggctactgatttcaattacatcatgtaacacttctcagtttatgcttcgtgctgccttgcgacgagtaaccgcaggagcaatagcatttaatcgagagttttgagtcctctcaaaactgaacaacagcacaagcgctatatgaccagaaggtcatacatcgactagagtaaaaactccatagaaaggaggtgatccagccgcaccttccgatacggctaccttgttacgacttcaccccaatcatttgtcccaccttnnnnnnnnnnnnnnnnnnnnnnnnnnnnnnnnnnnnnnnnnnnnnnnnnnnnnnnnnnnnnnnnnnnnnnnnnnnnnnnnnnnnnnnnnnnnnnnnnnnngatcaccctctcaggtcggctacgcatcgtcgccttggtaagccgttaccttaccaactagctaatgcgccgcgggcccatcccctagtgatagccgaagccatctttcaccctctctccaggtggagaaagggattatccggtattagctccggtttcccggagttatcccagtctaaggggcaggttgcccacgtgttactcacccgtccgccgctaagtttcaaaaagcaagcttcttgaaactccgctcgacttgcatgtattaggcacgccgccagcgttcgtcctgagccaggatcaaactctccgttaaaaagtttgacttgctcattgcacaaccgaagttgtgactcactatcattgacgagataccttgtatctcttttacgcttggcttttgttcagttttcaaaggactcgtttgtcgccgttctctcttggcgactcaattaatatatcatgtttccgccaataaagtcaatatctttttcaaaaaaactttaaaactactgttcttttgtggcgcaagaagtaatataacatggatcagatgaggaatgcaataagaaataacaaaaaaaccgctggaaaaagatagaatcatttttccacggtttcaaagaataagttgttgcacagctacaagcaaaagcatccctggcaaaccaagtaacgcgacagtcgttgctgtaatagcattaatgggaataaacaaacccgttgcagttgcaaatgagtttagcaagaacaacaacagtgtggcgataatcaaccgaacgccgatttgtccagctactcgcaatggctttactggcgcccctatgattaagagcaaaacgacaataccacctaatatggacaatataagccaagattccatcctatcacctcaaagagagctcgtcttgctttactgtatgatcgacacaacaaaaaaagaccctaaatcaggatcctttttgttttcgcctatggcggactcgcgcttcccgtagaaggagggaataaagcgcctcggctcgtttcacttgattcactaattcttcagaagggtctacactatgcgctaacagcttcttttgataatcgatcgattctttttggcgttccaacatttcgtacaacattgcttcttcttctttacgaagaacgcctttttttcgaaaacctaacatcaagatgccaccttacaattcgcgtctaccttcaattgctttagaaagcgttacttcatcagcatattccaaatcgccaccgacaggcaaaccatgggctaggcgcgtcactttaatgccagtaggtttaattaagcgtgaaatatacatcgccgttgcctctccttcaatggttgggttggtggcaacaatgacttcttttacgctctcgtcatcctgcaaacgtttgatcagttccgcgattttaatatcttctggcccgattccatccatcggcgaaatcgccccgtgtaaaacatggtaaagcccggtgtattcccgcattttctccattgcaattaaatctcgtgattcttggacaacacaaatcgttgtacggtctctatgcttatcttcacaaatttggcatggatccgtatctgtgatgttatggcattgagagcagtaagttaaatcccgttttgcatggacaagggctttcgcaaactcaagcacatcgtcttccttcatatcaaggacatgaaaggcaaggcggcttgctgtttttggcccaattcccgggagtctcgtgaacccttctattaattttgcaatcggtctcgggtattgcaatctcttagccccctagaacattcctggcatgttcagtcctttagtgaatttcccaaggtcttgttcaaccaattcgtcgactttcttcagcgcttcatttgttgcggcaataataagatcttgtagcatttcaacatcatcagggtcaacgacatcttcagaaatgttcacttccaaaatccgtttgtccccggaagcaataacagtcaccattccgccgccgaccgttgcttcaacagttttttcttttaactcctcttgtgctttcatcatttgtttttgcattttttgcatttgcttcatcatattacccatgttcttcatttccatccatctcctttaggaatcaatgatttcaatcaaatcttcgccaactagcttaactgcctcatcaatcaacggatcagcttcttgcggatgatcagtttgtttgtctttcatatattcagcctttatttgctgccattgttggttcagcaatgtcacaaaatcatggcgattgccaaatgtttgctttagcacttggcaaagaacgcctcgaaactttgtatccatcatatcacgatgcatttcattttgaaacgctaacagtaccttcgtgtccgaagcggcaacgggtttagagtcgcttagccatgcatgggcaggcacactctccccttttattttctccataatcgcgccccactggcttaccgtctcttgcaaatcggctttattggcgttttctaatagttcacgcgcagcggcaggagtcgcctttccttgctgtggcgcccttggctgcatacgccgccgttccttttgggcaggcgccggctcgcttttatcaaatgtgtttccctgtttgactgaggcaagctcctcttcaaggcgcttcactttttcttgcagtgcgcgcatttcttcattgcccacttgcgccgtgtcttgagcaggtgcaagctgcatcaatttcatcacagccatttcaagcacgatctttggctggagcgcccatttcatttcttgttggctttccgaaaggctctgaatagcagcataaataaacggcctgctataagattcggccacttgaacaaatgcatcatcaagcacagctctttcaaacaaatcggctgtttcaggcgctgttttatacaacaacaagtctcgatagtataacagcaagtcttccaaaagccttttcgggtcttttccgcctttgagcgtttcgtcaatggtttccagaacgaggcgcgcattttgtttttccaacgctgctgccaattgatgcaacgcttctcgggaaacagcgccggtaattgttaaaacatcttcggtagagactttttcatctgaaaaggaaatggcttgatcaagcaaactaagggcatcacgggcccctccatcagctgctcgggcaatcagctcaatcgcctcttcttcataaggctgttggttgttgtcaagtatgaacttcattcgattgattagcgcttcatttgagattggtttaaaatcaaagcgttggcaccgcgaaagaatcgttaacggaattttatggggctccgtcgttgccaaaataaaaatcacatgagctggcggttcttctaatgtttttaaaagggcattaaaagctcccgtggaaagcatatggacttcatctataatatacactttataggcaacttcgctcggcgcaaatttcactttgtcgcgtatatcacgtatttcatctacgccattattggaagccgcgtcaatttcaatcacatcgacaaccgagccattcgtaattcctacacaggcatcgcactcattacaaggttctgccactggagcttgtttgcagttgatcgctttggcgacaattttcgctgcactcgttttccctgtcccccgtgggcctgaaaacaagtaggcgtgcgcaagcttctgttgcaaaagtgcgtttttaagtgtttttgtaatatgtgattgcccaacaacatcttccagtaactgtgggcgccacacacggtaaagggcttgatagctcatcggctccccccttcttcttcattcggtatcattattatagccttttctatttctggtttaaagagcgctccacaaaaacttgttttgcccgtatcctttttgctcgcaagaacgttcttatttatatagaaagcaaaagaaaggaggtgcttcgatgacaagcaaccgcacagctgactttcaaaaggcttgggataaatacgcccaaagtacaaagaatcactgtttggctttaacaaaaaatcgctgggaagcggaagatttataccatgacacatggctcaaagcttggtcccattggcacaaagcaagcttaactcgactcacaaatgcttatttcactacgattgccaagcatacatttatcgaccactgtcgtaaaaccaaaaggcagccttcgcaaaaacctttggctgaaacgagtgctgccacatttaacgccggctcagacattgattatttgcttaaaccgcttgtgtcgagcctgacagtcaagcaactaggcatgtttttgcttgcagacgtgtacaaatggccgttaaaagacattgcccaggcgtgccagcagtcactaggatctgtgaaagccactctgtttcgagcacggcaaaacgtatccaaacatgtgcgcggacatttggagaaggactggcaactggcagacgagcaagctttgcatgtccaactgcttgtaaaagcactgactgaagaaaataccgcattgattgtgcaattggtaaatgagaccgttccagcgtctgttttgtatagcaagcatatgaaaatgcaaacgccagcaccacaggcgctggctgcttaagtaaaaaggagcgattttgatgaacataccgattccatatgtgatggaacaaacccgttacggggagcggagttacgacatttactctcgtctcttgaaagaccggattatttttatcggcgatgaaattaccgacactcttgcgaacagcgtcacagcccaactgcttttccttgcctctaccgatcctgaaaaagacatttccatttacattaacagccctggcggctccgtttctgcgggctttgccatcctcgatacgatgctctacatcaaaccagatatccaaacgatttgcaccgggatggccgcctcatttgcagctgttcttctagtaggagggaccaaaggcaaacgctgcgctttgccccatgcagaagtcatgattcatcaacctcatggcggcatgaaagggcaagcgtctgatatggacatttacgcacagcggattttgaaacaacgcaaagaaattaaccacttcatcgcggaaaggactggacaaacgcctgacaaaatcgccaccgacagcgaacgtgactactttatgagcgctgcggaagcaaaagactatggcgtaatcgataacattcttccagtctaacttgtgtcgagcggcggcaggtcactgccgctcgtttctatataatattgccaagtatgaaaagtctttggctaaaataaaaacgccccattcagccaggcaatactgaccgatggaacgtcgtttcattcatttcgtttttaagctatgcggcacacattatgtcgcatctacaaaaatatagtaaataccgtgcacctttcctcgataacagcgccacaagcgttacctgagcagttagctcgatccaggcacctctgcggcacacggaagggtccacttactgctgcttccttccggacctgacagggttcatgggtttccgttgcgcagaacccaaacgtcaacaccacttactcagggcaggccttgcagcaccgaaacctcaaaaagggattcaacctcgctatagcggattgcgagttacagggcaccgctacctccccatctagcacggcaaattgtaaataaaggtaagcacctaaaggtaaggtgcaagttcaagtatactagatcgactagacaaatgcaaccgttaacgaccttcttgcaaatcctgttttttccttttttggtcagcgcgcagtttccggaaaaatgccgacaatttctctccacatctttcttccagcacgccgctaatcacttcacaacgatggttaaaacgctcctcttgtaaaagattcatcaatgtgccagcacagccagctttttggtcccgtgctccgtaaacaacagtttgaatacgcgattgcacaatcgcgccagcacacatcgggcatggttcgagggtgacatatagcgtgcagccttccagccgccaagcgccgagttttttgtttgcctgttcaatcgccaacagttccgcatgggcgagcgctgaatggttggcctcacgcaaattgtaggcagaggcgatgagcttgccttcttttataatcactgcgccaattggcacttcaccgatttcctctgcctttgctgcctcttctaaagccacattcatccatttttcatgtgttccttgatccatcgatgaccatcacactcctgatcgtgttaaacgattccttgctatcactatataatgataaagaaaaacacggccactccagtggtcgtgtgtatatgcgaatatggcggaggaagagggattcgaacccccgcgcggtgtgacccgcctgtcggttttcaagaccgatcccttcagccagacttgggtattcctccgtttaactgacaaaagctagtatacgcatttttaagcgaaaatgcaagtatccgtctcgatgattctgtcgacaacctattagacgaatagaagacgattgtcagacgaggacgtatgcgagcgtgtgtctacagtttaaaaggctgcctaaattggcagcccttcatttttattgctcaatatacgtgtcgtggaacaagaagtcgcctgcaggcgaaacggcaatgtttttcacttcatcgcggacgccattcaaatattttttcgttgttgtaaacacaactggcacttcttcatttaagattgtttgtgcttcagcataaagctcattacgcttatcttcatctatttctttggcagcttcatctaaaatcgcatccaaatcaggatttgagtagaacgaacggttgcctggctcgcccatgctatcagaatggaagagcggcgctaacgcgtagtctgcatctcctgtagctgagctccagccaaggataaacatttcatgttcaccgtttgccgttgcatccaaatatgttgcccattcttggatattgatgtcaaccgtaatgttcagatcagctagttgattttggatgtattgcgctaaatcaacacgtgccgctgtatcattcgtagaaagtgttacttcaaagccatcttcatagcctgcttctgcaagcaattctttcgcagcttctacatcgtaagaaagcggctctgcatttggatcatggccaataacgccaggagaaactgggcttgtcgccggaagttcatagccgtctaaaatatcgttagcaattacatttttatcaatcgccattgcaattgcttggcggacgcggacatcatcaaaaggctctttctcagtattaaaaccaaagtaagaagcagaaatgctttccgtttctaacaaatgtgcgccgtctgttgcttccaattgagcaacacctgacacgtcaagcggttcaataaaatgagagcttcctgtttccagttccgctaaacgcgtgttgccatctggaaccgttttgaacgtgacagaatcaagttttgctggctcgccccaatactcttcgtttttcttgaagacaagttcagaagaaccgattttgccgctttcatatttaaaataacctgttcctgctgggtttgcattcacttcagtcgaaggttgttcgccgttttccatcgcctcatagtcagcgtcgataacgtcagggctaatcataaaaccagcgttatgagcaaagctataaatgagtggcgcaaacggttcttccgtcacgaactcaatttcatagtcgttgatgacgttaatttctgaaatctcttcaaataaaaacgcccgtggtgaggcaagtgcttcatcggtaatacgttcaatattctttttaacggcttctgcattgaattccgcgccgtcatggaatttaacaccttcttgcaatttgaacgtcaacgctgttccctcgtcattccactcataacccgttgccagacttggttgtagttccatgttttcgtcaaaatcgactaatgtttcataaacttgcccttggacttggccagatggcacgtcattgacttggtgcgggtctaaggcaacaatgtcagagttcattgctacaacaagatcgccgccttgtccgctttcttctgcgccttctccgccgcccgtgtttgtgttttcatctggttcactggagcatgcagcgagtccagcagctacagttaaagccataacaccgtataacggtttttttacattcattatttttatcccccttgttctcttaaatttctgtaaaacaaatttcactatatactattttacacaaataaacaatgtcctgctttaaacattcacattaatcgggactttagtcataattatttatactaatatattgatttacttgattttaatggtaatatactatgttttattgctttcttcagcgcatttcttttattttcctattataatagcgaccattttccactcttggttctcaagagtggaccggaaagtatgttcccattcgtttcataatcggtctcaaggctgccaactggatttatagtgactcacccctgattcgataaatctccataaaactgtgttcaaatccgaaaattccctttgcatatgtcgacattattcgctaaaatactatattaagattgctattttagattgttttcgttttaagacgtgttgtataatcagatgatgcgtataagttgaaaagaaaggaagttgaatatgtctcaggatactgcaagtcagccaatcggccaagttgcacaaaagccttgggtgcgaaattggaaggcttttttaggtcgtttgttgtcgaacaagtctgccgtctttggcggatcgctgattattattctagcaatcttagccgtcatcggtccttggattgctccacaaggcattaatgaacaagactttgcacttaaattacaaggacctactactgaacattggttcggcaccgatgattttggccgtgatgtgttctcacgtattttacacggtttaagcattacgtttcgtattggtttcgtttccgtcgccatcgccggcacggttggaaccgttattggcattatttctggctactatggcggtaagctcgatgcgattattatgcggattatggatattcttttagcatttccaagcattatccttgcacttgcaatcgttgcgacactcgggcctggcttgaataacattattcttgcggtagcaatcagcgcatttccagtatttgcacggattgcaagaggctcaacactatctgtcaaaaaattagaatatatcgatgctgtaaaagcgctgggtgctagcgatactcgcattatttttaagcatatattaccaaatacaatgtcgccattaattgtacaatcgactttatcgattgcaactggtgttttatctgccgcaggcctctcttttcttggtttaggcgtttcgcctcctagccctgaatggggtgcgatgttaaatagcggaaaagtatacatgttccaggctccgcatatgacttacgcccctggactagcaattgtcttgtttgtcctcgcctttaacctgttcggcgatgggcttcgtgatgcgcttgatccaaagacaaaataatttatagaaaagaggtgcgcctatgtttaagtttttagtccgcagattgctccagcttatacctgttatcatcggggtaacattaattgttttttcattaatgcattttattcctggcgaccccgctcaagtacttgcaggcgaatcggctacgcctcaacaaatcgaagccattaatgaacgactcggtctaaatgacccttatcccgttcaatattttcgttatatgaccaacttagttcaattcgatttagggaattctttacggaatgggcagcctgtttctgatttaattctccagcgaataggcataacgctcgaactttcgatatacagtacgattctcagtattttccttggcttgattgcaggtgtcttgtctgccacaaagcgtggttcattccgtgattctgcgattatggtgttggctttgtttgggatgtccatgccaaacttttggcttggccttgtgctgatccaatggttcgcattaggaaacattccatttatcggaaaatttatcgatacagcttggtttcctccttctgggtggggcagctttgagcaacttgtgctacctgtatttatgcttggcatttcaggggcagcgattgttgcccggatgactcgttccagcatgctagaagttattaaccaagactatattcgcacggcccgtgccaaaggggttagggagcggattgttatttatcaacatgctttaaaaaacgcgttaattccagttattaccgtagttggtttgagctttggcagcttgcttggcggtgccgttctcgccgagagcgtgtttgccattaacggaatgggccggctaatttacgacgcgattaacaaccgtgactttcctgtcatgcaaggtggcattttagttgcttcgcttttattcgtccttgttaacttgcttgtagacattgcctatcgattcgtaaacaaacgggttgaaacggaataaatcgtttaagagaaaggagtgagacgattggctaatgatccgatcttgcaaatacgtgatctacgtacttcttttttcacaaaggaattagaagtaaaagcggtagatggtgtgacatttgatgtggaaaaaggaaaaacgcttggcattgttggggaatcgggttctggtaaaagcattacgtccctatcaatattaaatttgctctcacatccaggaaaagtggtcggtggggagattttgtttaagggcgatgatttgttgaaaaaaacgcctgcgcaaatgcggaaaattcgcggcaacgaaatttcgatgattttccaggagccgatgacatcgttaaacccgacctttacagtcgggcagcaaattagtgagtcttttcgcattcacgaacatttatccaaaaaagaagcacgcgctcgttccattgagatgttgaaactggttggcattccttctcctgagaaacggattgaccaatacccgtttgagctttcaggcggaatgcggcaacgtgttatgattgcaatcgctcttgcgtgcaacccacacttgctcattgcggatgaaccgacaaccgcactcgatgtgacgattcaagcgcaaattcttgagttaattaaagacttgcaaaatcgccttggcatgtctgttattatgattactcatgaccttggggttgtagcggagacatgcgacaacgtcgccgtgatgtacggtggacaagtcgtggagtacgcctctgtccatgacttgtttacaaaaccgcgccacccatatacagtcggccttatgcaatcgttgccgcgccatgatgaagacgtagaaggcgatctgtctattataaaaggttctgtgccagcgccagccgatatgccaaaaggctgccgttttgcgcctcgctgcccatttgcaagcgacatttgcaaagagctgcctgaactcgaaacaaatgaagacggcagccaaatccgctgctggatttacacggataaatgggataagccggaggtgaatgtacgtgagcaatacgctactaaaagttgaccatttaaagcaatatttcccgattaaagggggcttcttaggacggacggtcaaccatgtcaaagcggttgatgacatttcgtttgaagtcaaagaaggcgaaacggtctcgattgtaggtgagtccggctgcggaaagtctacaactggccgggcaattctccgtcttgacgaaccgacttcaggaaaaatccagttccaaggcgaagatttgctctcattgaaccgtaaccaaatgcggaaaaaacgcaaagacttgcaaattattttccaagatccgtatgcatcgatcaacccgcggcaaacggttcgccaagtgctttcagaagcgatggccatccaaggcgttgcgcctgccagggatcatgatcggcttattcgcgaactaatgaaaacggtaggtttaggcgaacaccaaattgatcgcttccctcacgaatttagtggcggccagcgtcaacgcgttggaatcgccagagccttagctgtcaatccaaaattgatcatttgcgacgaagcggtttccgcgcttgatgtatcgatccaagcacaagtcattaacttgctcaaaaaattgcaacgggaactaaaattaacgtatttgtttatttcccatgacttaggtgtcgtccgtcatatttcagaccgcgtcattgtcatgtatcttggccgcattgtggaaatgggcgataaaaaatcggttttcgataatcctcagcatccgtatacaaaagcgttgctgtctgcgattccaaaaccggatccgagcataaaaaaagaacgcatcattttgcaaggcgacgtgccatcgccaattgatcccccaagcggatgccgttttcatacacgttgtccatttgcaacagaaaaatgcaaaacagaagtccctgaattgcggacaaccaaaggaatggcaaatagccatgccggagcatgccattatatggaggaaatttcttctggcgaacaccaacctgcttattcttaaaaacgcgttaaaacctgcttttggccattttaatggccgaaagcaggtttttatgtttacaagactttgcttaaaaacgattttgtacgctcgtttttcgtttgttcaaaaatctctacaggcgtgccctcttcaacaaggcgaccctcatccataaagaaaacgcgatcaccgacttcacgggcaaaccccatttcatgtgtaacgacaatcatcgtcatcccttccaatgccaattctttcatgacagaaaggacgtcgccgacaagctcagggtccagtgcggacgtcggttcatcaaacagcatcactttcggattcattgacaacgctcttgcaatcgccacacgctgtttttgtccgcctgacaagctggccgggtaagcatctgctttatcctctaaaccgactttctcaagaagcttcttggctgccgccaccgcttcccctttttcaataccccgcactttcaatggcgcaagtgtgatattttccaatactgtcttgtgaggaaacaaattaaaatgttgaaacaccatgcccacttcctggcgcacagcgttaatattcgttttcgggtcggcaatattgacgccatcaatgacgacttccccagatgtgatgtcttcaagccggtttaaacagcggagaaacgtacttttcccagagccagacgggccaataatgcaaacgacttccttttcgcgaatgtccgtcgtaattccctttagtacttcatggtctccaaacgatttatgcaaatccgttactttaatcatgtccgttccagtctccgttccgtgtagcgtaataaaagggaagccggaatcgtgatcgctaagtaaaacaggcagacaagcaagtatgtatcaaaatacgaagcagataagccagtatacgttctgctttgatacattaaatcggcaacggcgatcgtcgataaaagcgacgtatcttttaaactgataataaattggttgccgaatggagggatcatcactttaatggcttgaggccaaataatatagcgcattgtttgactccctgttaaacctagcgacctgccagcttccatttgccctttgtctatcgattgtaccccgccgcggacaatctcggcaatataggcgcctgagttaatcgcaatgacaaaaataccagtataaagcggatcaaaccgtaaatccaacagacctggaatcccgaaatggataaaaaagatttgcgctagcaaaggcgtccctcgaatagcttccacaaaaatcgctgcgattgctctcacaaatccaatacgagataggcgcattaatccgaaaatcgagccaacgatacttcctaaaaaaacaccgacgagcgtaattaaaaccgtgtatttcaaaccttcccacaaaaaaggcaatgccccaaaatccattttttatctcacctcttgatgaaagctggcatagcgatgtttcacatgccttctggtcgttctccgaagtacttttcataaatatcgccgtacgtgccgttttccatgagcgtcgccagcgcttcatttactggttcaacgaggtctgagccttttggaaaggcaatcccatattcctcacctgttaaacgctcgcctaccattttcatttgtccttctccttgctgttgcatgaaatactgcacattaggcatgtcatataaaacggcgtcgacgtggccagcaagcaacgcttggtaggcttctgtaatttcagggtaagcatccacttgcgcctccgtattatcttctaaatacgtttggctcgtcgatgacagccttgtcgccacttttgtggacgaagtgatgtcgtctatcgattcgatcacatcatcctcttctgctaccgtaaggactaagcccgattcataataagggtcggaaaaatcaatgttttctttacgttcttcggtaatggtcatcccattaatggcagcgtcataacttccttgttcaatccctgacaatgccccagaaaaatccatttgctgaaattcaacagcaaaaccagcttcttcagcgatcgctttcattaattcgatgtcaaagcctgttagttcatttgtctctaaatcaataaactcaaatgggacaaaattattatcggtagccacttgataagtttcaacattgtccccatccgccccgcctgtatgatcgctcgtccctgtttcactattattacaagctgcgaggacgagaacagcacttgctacaaaggcagtccctattcgtatggtcatagccatccccctttttctttttttctgttaattatgctagtttagcatgttggtattgttagtacaaaagcgtttatccttgttctccctcggtgagcacaagcttggttaaggaatacctcgcttttctagttcattcgctatttagcagccaatagaccactcattcatatgatatcattcttacaaaaaacaggcggtgaccgtaattggtttttaaaagcgaaaaaggaatcacttattcagtgatcatgtattccctcatgatcgtattaagcatcgatattgtctttgacttgaatgtagccgctttcccagtgcaaaacgcttttataaaaaagcccgtattggtactgtttttgctcctgattggttcgatatttttcaggacaaagtatgtccttaaaccaaagtcaaaaaccatcgtcgttgtgtttggtttttataagaaaacaatcaacatcaatacaattaacgcgatgaggtttacaaaggattttttcgcttcccctgcgctctcaagcaacaaaattgaaatcgaatacaatcactctaatcttattcgaatttctcctaaagagaagcagttattcatagaacaagtgaaaaaaatcaatcctgacatacacataaagcaaacaaaaagaaagtactaggatgctaaaaatccagttcgacggcgaatttctaagaccggcttaacgttaaaaatctctttcccactgaagcggcttatctacctatacttaaaaaccaatcacatagcctaatagaaaatccgaggcttaggctataagctgaggttgggaacaatctgttcccaacctctttacccattatcgcgtaatttaaaacaaaccactttctgttctgtcatctctaatatagaaaactttacgccttctcgtcctaatcctgattgctttgttcctccaaatggcatcgcatcaatgcggaaatcggagctatcattgaccatgacaccgcctgcttccagttctcgaattgcctgaaaaacagcattcatattctctgtaaataagcccacatgcaagccatagtccgattgattggccctttcaattccctctgcaagagacttgattttataaagcaagaccactggcccaaagatttcttctttagcgagcatgcactcatctggaacgttttcaagtaccgtcggttcataaaaagcgccgcgccgcttgcctccgcataaaagggctgcgcccatccgcagggcgtcgtctaccatgaacgcaacacgctttgcttctttttcagatataagggggcccatatcggtcttttcagatagtttctcacccatcaagtaagcacaggactgtttgacaaacagctccttaaagcggtcataaacctcttcgtggacgtacaagcgctgcacgcctatgcagttttgccccgctgcccagaaggcaccgctcacatttgcttttactgcgtcttcaatctgggcatcctcaaggacgatgactggtgaattagagccaagttccatgctttttttcttcaaacctgcctttttggcaatttcaagcccagcctccattccccctgtgaaggaaaccattcgcacgtcaggatgggtgatgagcacatcgccaacttcactgcccaatccggtcataacggacagaatcccttttggcaaacctgcttccataaaggcttcggctaacaagagtgcgcttaatggcgttgctgttgccggttttagcacaatcgcattgcctgcagcaatagctgggccaatcttatgggcgaccaaattcaggggatcgttaaaaggcgtaatggcgccaatgatgccaagaggatgtcgttcaaaataaccaaagcgccctgttccccctggggactggtcaaacggaatcgtttcaccggttactcggcgtgcctcttccgcgcacagtcgcaatgtctcgacacaccgccccgtctccttccgtgcttcgcgaatcgttttgctcccttctgtagcaatggtccgtgcaaatcgttctttgtgggcatcaacaaaatcggcagctcgatttaaaatggccattcgcttgtaaacaggaagagcagccgatgctttcgccccctcctttgcacgagcaattgcctgctccatatctgtttttgatgcttttgggacaattgcgaccaactgatcattttctggatttcggacttccattgtctcggtccggtctacccattcgcctgcgagcagcatttgttgccgccttaaatccagtttcattggaccgcctcctttactgattcgtcacttttctattctcctccataaaaaagtggcaatcgaccaaatcacttaacaaggcatagccagtttccttcttgcctgcccctgcccctgtcaacgtaatatcccccgctaggtcgcagctgtacgtaatcgcatttgtggcgccgtcaattgatgaaagggggtggcttgaatcaagcaatatcggtttgacagccgccttcataccgtcagcggttcttcgaattgtgccaagcattttccagcgcttcccttgctgtttcgcggtctgaatctcggcagctgataacgtctttaaaccgacccgttccacatcgtcaggcgtcagcgcttctcccataacggtattggccagaatgacaattttgtataaagcatcgtagccttccacatcgcttgtcggatcggcttcagcgtaccctttttcctgagcttgttttaaagcgtcatgataagacatcccgtcttccatctgtgttaacatataattcgttgtcccatttaaaattccgttcacttccgtaaacgtatttccaatgagtgctgtacgggctaagcgtaaagccggcgttccgctcataaccgtgccttcaaaaccaaggtagacaccgttttcagccgctaactctgacagttgtttgtaagccattgctatcggccctttatttgtcatcactacatgcttttttgccgcaaatgccgttttgcagtgtgtgatggctggttcgcctgttttgatatccgtaaacgtcgcttcaacaatgacatccgcattggtctgcacgatcgtcgtcattgcatcaagacccctcacaagcgtagcggagttagaatagtcttctaatgagccaacggttgctgccaagtgaagcactttatcgagatcgagaccatttggatcatacaatgacccaattttaaaatcggaaattgccactactttaggcgccattcccgtttgctgcttcgttttttcacattgattggccaaaatttctgccaacccttggccgacaacgccaaaaccaagaatcgccaatttcatggtcgcactcactcctttttatttaaggcatacgcgcatacgcctgccataagcgcagctccttttgaaaggcaagcttcatcgatttggaactgtggcgtatgcaaatcaaactcgccatgccgaggctggcaacctaagaaaaacatcgccgcttttgtcgttttggccatatgagcaaaatcctcacttcctaacccgtaaggcccagtaacaatacggtcatttggataaagatggtgggccgcctgtttgattagcgcaatcgcctcactgtcattcacgagcgccggctcgcctcgtttgactgtacatgcgccttcaccgccaaatacattggctacagcaaaagcattgcttacttcttccgtaagttttttgcgaacatcgtcgttgtaacaacggatcgtgccttctacttcaacgatctcagggatgacgttgtttgctttgccgccatggatttggccaatgctaatcacggccggttcaagcggggaggaaaagcgaccagtcagtccgtaaatcgccggcagcacttgcgaaagcaaccatatggcgtcaacgcctaaatggggataggcgccgtgccccccgctgcctgtaatcgtccctttaaatgcatcaaagctggccatgctcgcaccgctatggacttgaatcgcatttggacgcagccacggacacatatgaagcgcaaaggcgatatcggctccagccatcgcccctgcttctatcatatagatagcgccagtcttcccggcttcatccatcttctcttcagctggctgaaacaaaaaccgaactgtgccgtttaggtaccctgcctggtgccgctcgcttaaaatcgtcgctgcgccaagtaaaatcgccgtatgggcatcatgcccacaagcgtgcatcgtcccttgtttgatgctagcaaatgaatgtggcagttgttcctcgatcggcaatgcatccatgtcagcgcgcaaaaccacggtttttccttgctttccggcaagttcagcaacgacgccatatccaccgacttgttccgttacgaccatcccaggcaaacacctaagcacctgggccacaaaagcagcggtttccttttcttgaaagctacgttctggatgtttatgcaggtgccggcgccatgtcataagctgatcttgcaattgttcagctcgctctcggattccaacaacattcatgttcaggcctctattttggcagcctcaaatgcctgcttaaagtcagcgatgatgtcctctccatcctcaatgccacatgatacgcgaattaatccttcaggaatgcccatggctgcacgctcttgtggcgtgcattcgacatggcttgttgtccgtgccggtcctactgtcgtctcaaccgcccctaaatttgcagctcgattggcgaatgctagctttggcaataagtggcgcactgtatcgacaccgccagcaacagcaaagcttagcatgccgccgaaaccagacatttgcgctttggcgatttcgtggttagggtggtcaatgaggccgggataaaaaacagtttcgacctcttcgaccgtttgcaaataagcagcgagcttctcggcattttcagcttgccgtttcactcgtaattcaagtgttttcataccgcgcaatatcaaataagcggcccaagggtccattgttgccccgttgatttcccgatagtggtaaattgcttcaatcagagactcatctaaaccgacgacaacccctccaagggcatctgcatggcctcctaaaaattttgtggcgctatggagaacgagatcagcgccgagggtaagtggattttgattaactggcgttgcaaacgtattgtcgacgacaacaagtgcgccaacttgttttccagcttctgcgcaagcgcggatgtcagtaatttttacagttggattggtgggcgtctctaaataaacgatcgtgcagcctttagccgtttcttttttgatttgctcaatatcccctgtttcacaaaaaacaacatcgatatttaactttggcagaaattcagtgaaaattttattggtgccgccatacgtatctttaatggtcacaacgcggtctcctggccttaaaaacgtataaagcgtgttggaaatagccgccatacccgttgagaaactagttgctgcattcgctctttccagcactttgactttatcttcaaacgcttgcacggtcgggtttgtattgcggccataaatgtggcctttttttctgccaacggccacttcataccattcgtccatatcgtcatagccaaaagccacactcggaataaccggcacttgtgtcgctccgtggaccaaatagtctttttctcctgcccatactgctttcgtagcaaacttggcgttgttcatttttgtcatgataagccccccaatcaattatgaagcagatgcatttggatcattggtcaacagctgacgcggaaaatcacaaagaagctcacagccattttccgtcacccgtaccgattcactaatttcgacgccaaagtcgtcgtaccacatgccagggatgagatggaacgtcatattggcttgcagcaccgttttatctccctttcgaatgcttgccgtatgttcgccccaatcaggtggataattcaatccagctgaataaccaatacgcgcttctttttccagtccgtagcgcccaattgtcttcctccagacggcttccacttcttcgcacgtgactccaggcttcatccatgcaagcacttcattgagcccttcaacggcaattttggctacatctacaacacgctgttgcggttttccaatcgtcactgtccttgcgagtggagcatggtaacgttgatagcagccagctaactcaatgatgactgtatcttcgctcggatagcgttggtcagaccacgtaatatgaggagcgcttgttttcacgcctgacggcaagagtgggacaatcgccggataatcgccgccaaactcctctgtcccggcaatttgtgcgtagtatatggctgcaacgacatcgctttcccgtgcgcccgcattaatggcattcataccggcatacatcgccttggccgcaattttgcctgcgcatttcatataatggatttccatgtctgacttgatgatgcgcacatagttgacaaggttagtcgcgtcgacaaaccgggcgtccgccaagcgttgcgtcaggcgttcatgtgcttttgccgtgtagtaatacgtatctaattcgacgccaatgcggcggttgccttggccaatatcagccagaactttggcaataaagtccattgggtggcgatcatccgattgcacataatcgtcagggtacggaataatccgttcatgcatcaaccaagttgtctgcttggcaacgttcgcgtccatgccccgcccaatccaaatcggctggtcctcatcaattaagacgactagcatttgatggacataaaagcaccagccattataaccggataaataattcatattggctgggtcagtgagcaacagcacgtcaatgcctttttcactcatgcgttcctttgtttttgccaagcggacctgatactcctccaatgtgaacgggaacatgtaaaccagcctccttttgagtaggtcattcgtttctttcattctactcataagctgaagctatgcaatattttgaatgtatgaaaattcgatcgcttctgtagacattttggcggatccctcgtgtgacttgcctccatctgaaaaagatggcgtttcttacccgccatcatccaccgagacaaagataacttttagtcgatactccaactatcagggttaacttataaaagtaaaaattccaacataaatacaaaaaccagaaagaacaaatacaaagcaagctaaaaatggcctctcttttttaaactccgaaagaccaatcgtcaaaatcattaacccactgaagagtgtagctaagggctgcaaataataggtatgactaaaataaccaattagtgcaaagatggttgtaagtaaggcaaaaagtacgcgccaagcaaataaccgattcaaaaaaatccccctaaaaaacattggcacacagtataacaaccttatcactcttttcacaactgtcatccagaaatagatagagaatctctcttatttttgggtccactctcattctctgtatataaaaaaactccagatagacgatttaaacacatgtccacctaaaggggatatgcctatacaattcgaatgatacggggagacggccatggcgttcgtttctctagattgtcttttctgtttgctttaaacgagctgttgttttattcggatgccggtatacaattgattttccaagtaaagttaagataatcgataggagcggtacagtgaaatttaatatagcgtatggtgcatattgaaaagcatgtacgcctaatgtagccaagataaataccccacatgtattccatggcacaaaaacagacgtcaatgtccctccatcttctacggcgcgcgataagtttttcgaatgcaactgttgatcctcatacgattttgcatacattctagcaggaacaacgatcgaaatatattgttccgaacaagaaacattggtggcaaaactggaaagaaccgtcgtgataattaagcgtttagctgtctttgccccttttaaaatttgctgaacaattgcctgaagcatgccagtgttttcaagtacgcctccaaacgtcatcgccacaatcgttaaagagacggtgtacatcatggcctcaattccaccgccgttgaataattcatctaccatatgattacctgtgtcaatcacgtaaccgttctgaagtgtggatacagcaatactccatgcatctccttggacatagatttgactaaaaaatcctaatacaattcctacaaccaatgctggaatagctggcactttaaacatcacgaatacgattactgctagtggtacaattaatagccaaggagagagcacaaagttttcttgaagtgaagccattgttctttctatgtcagcaaaactggctgtatttccctctacctcgtttctgccaagaaaccaataaacaattagcgagatcagaaatgccggaatcgtggacacaagcatacatttaatatgttcaaacaagtctgtccctgttaagccagcagcaagattcgttgtatcggataatggcgaaagtttatctccaaaatacgctcctgagatcaccgccccagcgaccattgccgccggtattcccatacttaaaccaatccccatgccagctacgccaatcgttgccatcgtagaccatgaactgccaatcgatagagacacggcagcgcatatgacacaaattgaaactaaaaagaaagacggactcattatttttaatccgtaaaagaccattgttgctacaattcccccacctatccatgcaccgatcgttaatccgacaagaataataatgacaacggctggtaaagcaagtttaatccccttatacatgctttcttcaatttctctccatttaaaacctgctttcattgccattaatgcagctacggcggttccaatcatcaatggaatgtgaggatctccttctaatcccacgattgtcacagccattgctgtaatcatagtaatgagtggcaacagtgcgaaccaaaacgaaatgtctttcttcatttttctcccccttgtatgcctctaacaaatccaggcaaacgcttacatttatgtatacactagaaacagtaaaaagctaagcccacgccctaaaatgtgtagcttcagctgcttttcgaatcccgacaatagtaagaagccagtcgcaagtttacgcaaatagtcaatacggataagttatattcatccctcatccacgctatcatttgtgcgtttgtaaaggcgtctggcgctgaaatgcctttggtcgggccaacagcatcattgtactgggcccgatagcctgtaaatccttttgtctttccattatccatgcggattagctcttttaatcattcatacattccatctgaatcgcctagaccgcaactgcttccatttgtcacgccttatttaacaggcttctcttttgataaaacatattttattttttcaatagcccaatctaattcttcttttgtgatgacgagcggcggagcaaaacggatcgtgttttcatgcgtttctttacataatacccctgcttctttcaactgttcacaatacttacggacaggatgattgaattcaacgccgataaataatccccgtgctcgaatggctgttaaatcatcattatcaatcgcccgtaacgctgttgtgaaatactctcctaattctaacgatttcttcactagattttcttcctcaatcacttcaatggcagctagagaaacagcacaagctagtggatttcctccaaaagtagatccatgtgaacctggcgtaaatacatccataatgtctttgtcggcagcaatagctgatactggaaaaacgccgccccccattgcttttcccatcacataaatatctggaacgacattttcccattcacaggcaaacatttttccagtccgtgcaaaacctgtttgtacttcatcagcaataaagagaatatcgttttccgtacagagatcgcgaacagcttgtaagtaaccttcaggcgggatgatgatgcctgcttctccttgaatgggctctataatcatagccgctgtatttggagtaatggcttcacgaatcgcttccacattcccatacgctaccttttttatccctggcacaaaagggccgtaatgtttggtcgctcccggatcattcgataaggagaccgcatttaatgtccgcccatgaaaattgcctttggccgcaataatttctgctttgttttcttcgactcctttgacttcataagcccagcgacgagctgctttaatcgctgtctcaaccgcttctacccctgtattcatcggcaacactttatcttttcctgtcaattccgccacgcgcttggtccatggaccaagctggtcattatggaaagcacgggaagtcaatgttactttatcagcctgttcctttaatgcctggatgatctttggatggcgatgtccctggttcaaagctgaataagcgctaagcatatccatatatttatttccttcaggatcctttacccacacgccttctgcctcagcaatcacaactggcagcggatgatagttatgcgccccataagcatttgtttgttccataatgtaatctgatttttcaatcgtcataaaaaaattcctcctttataggtcgtaaatcacaatcgtttccattctgtactcactgtttctatatgcaaacatcatgccaaccgatgaacccagatgctgaaacggttttaacaagattgcacaaaaaattttttgcatggtgagaaggataaacgaaaaaattttttgcgctttatcggtttatcgattacactcacttttaaaggaggggtattttgaaaaaaaataaaacacaaaaaaatctagcgcaactgaatcacctatatcaaatgctaatagacgaaataaatgtgggtatccacgttattgaccaagatggccatacgatcatatacaataaaaaaatgatggaaatcgaatcgatggtagacaccgatgtactccataaaaatcttttagaagtttttacatttcacgacgatgaacgcagtacacttgtacaagcattaaagacagggaaagtaacgaaggatgtcaaacaaacgtattttaataataaaggggaagaaatcacaaccattaacaatacctttccttttatcgaaaatggaaaaattacggctgccgtggaaatagcgaaagatatgacccaattggatcatgtcattaagaaaaacgtgctgagaaaaagagaaagccattatacctttgaccaaatcatcggcaacagccaagcctttttagccgttatagaagaagcaaaacgagccgcccgcacgtcgtcttctgtactaatcgttggagaaacagggacagggaaagagttatttgcccaaagcattcactatgctagcccgagatcacacgccccttttctagcacagaattgcgcagcgatccctgaaaatttaatggaaagtttattatttggaacgaaaaaaggagcatttaccggggcattggacacgccaggcttattcgagcaagctgatggcggaacattgcttctggacgaaataaattctctcgaccctgctttacaggcgaaattattacgcgttattcaggaaaaaaccatccgtcgcatcggcgataccaaagacaaaaaagtcgacgttcgaatcattgctaccattaatgaagatccgatagatatgattgcaaagcagcgcttacgcaaagatttgtattatcgtctcagcgtcgtcactttatttatcccgcccttgcgtgaaagaaaagaagacattcttccgcttatcgaggaattcattcacaagtataacacgctatttcagatgaatgtgaagacgattagtgaagaggcaaaggcgattctgttccagcacgattggccgggaaatgcgcgagaactggaacatacaattgaaggcacaatgaatttcattagtgatgaaacagaaattcacatacacaacctgccgtttcgattgcgcaatcgctatcagaaagaagtgaaagacacagaaacaggcaacttacctgcaaaaacattacaagaaaaaatagcagaggtcgaaaagctctatattttacaagcgttaagagaaaacaacaacaacgtttcccaaactgcaaaaaatcttggcatgagcagacaaaatctccaatatcggctgaaaaagtttcacctttcattgaagtaattacgttgccctacagtcatccactagttcgtgtgtgaacttggcttgacatgaagcatcggaaagatacgaaaaggagacaaagtgacgtccccgatacgctcgcctctccatagaaagccagtgtttacaggtagtggtcaacaacgccgccgatattaatcagactgatagaaagtgtctgtcagacgagaacagtggtttcgtttcgtatccgttttaacccattcgcgtgaggcaacggtctaggagttaggcgtttgcatgtggtgttggatcatcgatatacgaatgctaagatcaagcaaaaagacatcatcaggattcgccaaagataaatgagtcagcgcctcaattttccgaagtcgatatagcagcgattggcggtgcaaatgaagaaagcgcgctgtctgcgtcactttgttttggtttctttggtatgcgacaaatgtgccgaccaagtccatttgcctttgttcatcgtaggcaaacaacggtgccgcataatctaacacgaggcttcgcagttctcgctcttgccctattttataaaggacacggtcaatgcgcgtatctgtataaaagatccggcttccttgccctttcctgccgatgccaagcaatagtgcctgtttcgcttcttggtaccggtcttcaaatgcataggtgtttagttgctggtcaccgattccccacgttatttcgacatcgggaagcaaatgggccaaacggcgatcaagcaagtcaagaaatccattgaccgtcgtccggtaatcttcacaaggaacggctaaataaatcaatagctgcccatccataaacgtcgacatcgtttcccgttcaaccgttacgcctgcatagtagatctcttcttcgatataatggaccatgcttagttgccagtctttaaaggaggctacttgatcagaacggctatacagttcttccatattgtgcagcatgcctactatcgcgatgtatggcacagaaacctcatatcctagcgcttcagcccgtatttttagttgtgcttccgtttcaatcaacccttgggccaaatcggcgacgaaatgattgcgcatacgtgcttctgtttcttgcactgtgttctcttgcagaaaccaaaatgcagcggctgtcccggcatgttcgagcaatataaaggctgtcgctaggtcgcttgaatccattttatccctattaacagcaaatacatagccttgaatttgctcatttgcttggatgatcggcaatatatggacgtctgtgccatctgtatggagcgtttggatttttcgttcaagggggtggtgctcactttcctggccgctagtgcgcatgtgtttgtacactttactaactaggcctaccaccggttcagctccatggcttttcccttttattcgcccttgggcatccgttataacaatgggtacggcggcatagccagcaacatgttctgctagagcagacaaatggttcccagcaagcattaaagacaagagttcctgttgtaccttttgggtaaattgccaatcgtcctgctttgaatcaacaagcttggccgttactgcctgtgtaatgtcggcaaagcggatctcccatggcaaaaaaagaatcggaaactgctcattctcagcaagggtgcggacatcttcggacaattcgaacacaaaccggccgatcgccactgcaagccctgacgcttccgacttaatcacatcttgcacaaaggcataaaacgccttcggctcttggttgcagccgatgccagtcgtaaggacaagctcattttgcctgataaagttttccactggtgcttccgtaatcgaaacccattcaacttgtcggtatggcaactgttcttgtgcagtcttaatgatggcaggcttcataatgtccaattccattacttgcgccaatgtaatcttcattcaacccacccccattggaatcgttaccgatataaatcaggccgcctgcttgaaaacaccggcactctttcccgcacttcagcagctttgctaaaatcaactttacattgaagccattcttcttcagtgctgctgccttcgacaataatttccccccatgggtcaatcaccatcgatgtgcctgcataatcggttccgttgtggctgccgacgctattgcaagaaaggagataaaactgattttcgatcgctctggcttgctgcaatgccttccagtgcatcgcccgcgccaacggccattcagcaacaataaaaagcacttctgccccttctaatgcaagacggcgcgccaactcgggaaaacgcaaatcatagcaaatcaggaccgccattttgacaccatctaattcaaataaggcagggggcacgcttccgccttgcatgtaagcaggttcattcagcatagggacaaggtggactttgtcatacgtatagacaagcttgccctgggcatcgatgacaagcgctgtattgtaaatgccaccgtctttctttgtcgcaatcgaaccggcaaccatatgaatgcgatgcgctcgggcgagttgttgcaaaaatgcaatcgtctccactccctcttcttccgccagttcgccaaggtcctcaagctggtacccagtcgtccataactcaggcaacacgatcgtgagcggccgctctagttgctcacggcatagttgctcaacccacgttttaacacgttctcggttctggtctggctttcctgctaatacttccatttggaaaacagcgacatgcatcgtttttagctcctttgtaaaaagctgcagcacgctgcagctctctttatgaaagaatgttcacattacccatatatggccgtagtgcttccgggatgacaatggagccatcttcttgctggtaattttcaagaatggccgctaccgtacggccaaccgctactcctgaaccattgagcgtatggacatactcaggcttgctttttggatcgcggcggaatttgatattggcgcgccttgcttggaagtcaccaatattggagcacgaagaaatttcacgatacgtattggcgctcggcatccatacttccagatcgtacgtttttgtagaggcaaaggtcaaatcccctgtacacaacgtaacgacccggtaaggcagtcctaagcgtttcaacacgttttcggcgtgggttgtcatgatttcgagctggttgttggaatcctccggtaaagaaaaacgaacaagctctactttgttaaattggtgttggcgaatgagcccccgcgtatcgcgcccagcagaaccagcttcagagcggaaattcgtgctgtaggcgttataagcaatcgggagctgctctccttgcagcacttccccgcgatgcaagttcgtgaccggcacttctgcagtcgggatcaaaaaataatcttcttcgctaattttaaaaacatcttcctcaaatttaggcaattgccctgtaccaatcatacttgcgcgattgacgatataaggaggcagtacttccgtatagtcatgctcagtcgcatgcatatccatcataaaattaatgagcgctcgttctaggcgtgccccgagccctttataaactgtaaaccggctgcctgtcacttttgcggcacgttcaaaatcaagaatatcgagcgctgtacccagttcccaatgaggacgcggctcaaacgaaaagtcaggcacgtctccccatttacgctcttcccgattatcctcttctgattcgccataagggacgtcttcctgtgggatattcggaatcgtgagcaagagcgcttctaattccgtttcgatgctgcggagctgctcatcttgctctttaatccgttcagagacttgcttcatttccgcaatgagcgaattagcatcttttttgtctctttttaaggcagcgatttgctcagatacgtcatttcgtttgctttttagctcttcgacttcctgtatcatcgtgcggcgtgaagcatccaattgggagaagcgttcaagcccctcaatcgtgccgttacgtctttctagctgcgctttcacgccttcaaaatcgctgcgcaattttttcacgtctaacatctaaacgacctcctcgttactcctatccattttaccaaaattcataggagaaagaaaagcacacaagcagggcatgcgccctgcttgtgatcgacttgttcgttgttttcttatcccatgatgctatttgtccattcgcttaactgaaccaactgctaatggtgtcagaaacgctggaccataaatttgaaaagaacccgccaattcctctcatggacatggtgaaccagcctgcttcttccacatctgctgctgcaacaagttcaatcccgctttgctggctgcctggaagataatcaactggctcgtccatgatgacttttaatgtcccaaccgtttccccttcttctataggagcgacaagttctccattttcattcgttttgctttcatccagttcaatttcaacggagtagttttcgttctgcccttttccgagcataaaagttaaatcacggtttgtcacgagttggacttctttttctttcccacgcgctacgggaacgacaccgccttccggttccgttccagcatcgatgatccgatgctcttcaaattgactaaacccataatcgagcagttttttcgtctcgttaaaacggtcatcccgggtatccgttcccattactacagtaataaggcggacaccatcgcgttcagctgttgccgtaaagctattgcctgcagcatccgtatatcctgttttcaggccatctaccccttcataataatgagggctgtttggtagcatccagttccaattttgcatatcaattttttcatctgggccagaatcaaataccgcttcaggcacacttgccgtatcaagcacttcagggaaatctttcaacagatgatacgcaagttgggcaacagaacgggcagaaagcgttgtttccccatcggctggagtcccctctggatgttcaccttgcaagtcagcattgtttaggccgctcgcattaataaactcatacttttctagccctagctcttctgctttttcattcatcttggcgacaaactgagcttccgtaccagccacatgctccgctaacgccatcgtcgaagcgtttgccgaataaatcgccatggactcgtacaaatcttttaccgtatacgtataatcctggcgcaatggaacattggatagctctctttggtgggacaatggaagcaaatgatcggtgatcgttacttcatcttcccaagagatgtcaccattggcgattgattcaagcactatgtactcggtcatcatttttgtcatgctggcaatcgccaattgttcatcgctattttgttcaaataaaatttgtccagtatcggcattaacgacaatcgctgcactggcatctactgttaaagactgcgcactggcaggcttaattggtcctagtacgaaagcaagcatagccaatgcagccattatacgcattgtccagcttggtaaacccttttgtttcacctttacacccccgcttgtataacacacatttgctattttaacatggtggcaccaaaaaaaatagatagggaagtccctatctatcggtaaaaaaatgtggaattttttacaatgtatagtttggtgcttctttggtgatttgcacatcgtgaggatggctttcccgtaaaccagcagcggtaatacggatgaactgactattttcccgcaactcatcaattgtcggtgtgccgcagtagcccatgccagccctgatgccaccgactaattggtgcacagtgtcagctagagggcctttgtaggacgttctgccctcaatcccttcaggcacaagcttttggttattttcttggaaataacgatctttgcttcccttttccattgctccaagtgagcccatgccacggtacactttatattggcggccctgatagatctctgtttcccctgggctttcgctcacaccagcaagcaagctaccaagcatgacagcatgtccaccggcagcaagtgctttaacaatgtcacctgaatatttaataccgccgtcagcgataatcggcacaccatgttttcttgcctctgtcgcacaatcgtacacagctgttatttgcggaacgccaattcctgccacaacccttgttgtacaaatagatccaggaccgatgccaacttttactacactggcacctgcttcaatgagtgctcttgttccttcagctgtagctacatttcctgcaatgatcgtcaggtcagggtagtcattgcgaacttgtttgattttatccagaacacctttagagtggccatgagcagtatcaatgacaatcgcatctacgcctgcctttacaacagcggcaatgcgagcatcagcatcagtagacacgccaatcgctgccccaacaagcaaacgtccttgcttgtcttttgcagaattcgggaattcaatcactttttcaatatccttgattgtaatgagcccttttaaaatgccattgtcatcgacaagaggcagtttttcaattttatgctgttgcaatattttctctgcttgttcaagtgttgtccctacaggcgctgtcacaagcccttcttttgtcatgacatcatcaattttgatcgagtagtcttcaataaagcgcaaatcccgattcgttaaaatgccaacaagtttttgctcctcatcgacaatgggcacgcctgaaatccggtattttcccattaaatgttccgcgtcaaatacttggcgatctggagtaagaaagaacggatcggtaataacgccactttcagaccgctttactttatcgatttgctcagcttgctcttcaatggacatgttcttatggataatgccgatgccgccttcacgggcaatcgcaatcgccatttccgattctgtcactgtatccatccccgcacttaaaatcgggatattcaatttcacattctcgcttagtttcgtggcaactgaaacatctcttggcagcacttccgacttagccggcaccaagagaacatcatcaaacgtcaatccttctttttgaaattttgtttcccacattcagattagctcccctcaaacgcctgaaaatattattagtagcttaacaattgggcaaactactgtcaagacaagggtttaagtactacttttctgaattcagtgtgcaaaaaaatgggagtgtatataaagtggagcgtttaactttttttgattcagcatctttcacgcggaactatttatttgagtgttatcaaagccactcatacgatgatgcatcctctatgagctaccaaaattgttaccgatttatgtaccaactgcagcatggttgtttgtacttagcccaagcgcaaatcgctccttttgcgatcaagccaatgcttttattttatggcctttcacagctaatcaagtcctgtgttttatcggtcgacccttattaccctgaaaatgctgctgtgctcgcccatggcatcacaacaagaaaaagaaagaagcaaggctactcttttttagatgacgaagtgaaggagcaacgaaacggcctttatcctcatatgataaaaaaattgtttcacatggaacattcggagaataaatacacaatgaaagttttacttaagcaacttcctgatatgcatgcttgttttgcattcctcgttaatgaagaaccttttatgaaaggaaaatgggctgccaccgatagaatggtttttgagccgatcttgcttgacttgtatcatatgactgctagccgctttcaacaatatgcacttgagcaaatgcgtaagctcgtgccaaaaacgcaagcaattaccgtagtagaaacaaaacaacaagtcgaaatccgctttgccaatgcccaagcagccagaaatgcggctcccccttttcattttgataaagatggctcccccctcatccaccgtttgaaagccaatcacttgccattgcctgaattggctatttactatctcgtgctgtacaacttgagcatgatctgccggtatgaaacggaatggtggggagaacgaatccatacaatggattgcgatgagatcccttttattaaacaatttttagaaaccgtccaagcacggacaaagaagcttgtcgaatgtcagctatttcaataaagctgcacggtgtttgaacaatgcttttataagacggaaacgattgcttctgcatgacaacgaggcttttcgaatgaagcttattcatggagcctatttatatttaactctgcttcttcgaagcagccctcttttgcttcctgcccataacaaaaaagacacctcttcaggtgtcttgctgttgcccggcaacgtcctggctccgggattatttcctacggggaagtggggcatgaagctttttcaagatgtttttcatgttgttttacgaaaatgatccctacgtctcgcaggagggcatgaggcttttccagtgaagcctattcacgtagttttttatatgagcttatctccatatactcctaataagcatttaactctgcttcttcgaagcagcactcttttgcttgctgcccataacaaaaaaagacaccttttcaggtgtcttgctgttgcccggcaacgtcctactctcgcgggaggaagcctccaactaccatcggcgcaaaagagcttaacggccgtgttcggcatgggaacgggtgtgacctctttgccattgtcaccggactctacttcagataagcttcggatttcttcgtccagttcgtgtctctcagtcggtcacgtacgtttgggtacgctcccttcttcgagcactcctgtcctcgaactccttgcttctcttcgtagttcttttttgacttcagataagcagcgaatcgcttcgtctgcactgaaggataaggaaagaatcggtgattctttcaaaactaaatccgaaatagactcaatgtcaagaatgtgtataggataagtcctcgaccgattagtatcagtccgctccacgtgtcgccacgcttccacttctgacctatcaacctcatcatctctaaggggtcttactggcttacgttatcccgtccatacgtagctacccagcgatgctcctggcggaacaactggtacaccagcggtatgtccatcccggtcctctcgtactaaggacagctcctctcaaatttcctacgcccgcgacggatagggaccgaactgtctcacgacgttctgaacccagctcgcgtgccgctttaatgggcgaacagcccaacccttgggacctacttcagccccaggatgcgacgagccgacatcgaggtgccaaacctccccgtcgatgtggactcttgggggagataagcctgttatccccagggtagcttttatccgttgagcgacggcccttccatacggcaccgccggatcactaagcccgactttcgtccctgctcgacttgtaggtctcgcagtcaagctcccttctgcctttgcactctacgaatgatttccaaccattctgagggaacctttgggcgcctccgttactgtttaggaggcgaccgccccagtcaaactgcccacctgacaatgtccctggcccggatcacgggtcgaggttagaatgccagcaccatcagggtagtatcccaccgacgcctccaccgaagctagcgctccggtttccaaggctcctacctatcctgtacagatgataccaacactcactatcaagctacagtaaagctccatggggtctttccgtcctgtcgcgggtaacctgcatcttcacaggtactataatttcaccgggtctctcgttgagacagtatccaagtcgttgcaccattcgtgcgggtcggaacttacccgacaaggaatttcgctaccttaggaccgttatagttacggccgccgtttactggggcttcaattcagagcttctcccgtaagggatgacccttcctcttaaccttccagcaccgggcaggtgtcagcccctatacttcgccttacggcttcgcagagacctgtgtttttgctaaacagtcgcttggatcctttcactgcggctctctcgggcggttaaccctactagagcaccccttctcccgaagttacggggtcattttgccgagttccttaacgagagttctcccgagcgtcttagaattctcttctcgcctacctgtgtcggtttgcggtacgggcacctgtattctcactagaggcttttctcggcagcggaggatcagggatttcggacccgaaggtccttcacggtcacagctcagccttatggaacacggatttgcctatgttccagcctcgcatgcttcgacgcgcacagccagcggcgcgctcaccctacctttctgcgtccccccatcgttcaaacgaatacgaggtggtacaggaatatcaacctgttgtccatcgcctacgcctttcggcctcggcttaggtcccgactaaccctgagcggacgagccttcctcaggaaaccttgggctttcgacggataggattctcacctatcttttcgctactcataccggcattctcacttccaagcactccactagtcctcacgatctagcttcgctgtccttggaacgctcccctacccaatcccttacgggattgccatagcttcggtgatacgtttagccccggtacattttcggcgcagagtcactcgaccagtgagctattacgcactctttcaatgatggctgcttctaagccaacatcctggttgtctgggcaactccacatccttttccacttaacgtatacttggggaccttagctgatggtctgggctgtttccctcttgactacggatcttagcactcgcagtctgactcccgagttaaagtcattggcattcggagtttgactgaattcggtaatcctgtggggacccctcgtccaatcagtgctctacctccaagactcatcactcgaggctagccctaaagctatttcggggagaaccagctatttccgagttcgattggcatttcacccctacccacacctcatccccgcaattttcaacttgcgtgggttcgggcctccagtcggtgttacccgaccttcaccctggacatgggtagatcacccggtttcgggtctacggcatcgtactaatgcgccctattcagactcgctttcgctgcggctccgcttcatcagcttaaccttgcacgataccgtaactcgccggttcattctacaaaaggcacgccatcacccgttaacgggctctgactagttgtaggcacacggtttcaggatctctttcactccccttccggggtgcttttcacctttccctcacggtactggttcactatcggtcactagggagtatttagccttgggagatggtcctcccggattccgacggggtttcacgtgtcccgccgtactcaggatccactctggaggaaacgaagtttcagctacagggctgttaccttcttcggcctgcctttccagacagttcacctactccgtttcttgatcactccgttattgagtgtcctacaaccccaagaggcaagcctcttggtttgggctgtttccgtttcgctcgccgctactcaggaaatcgcatttgctttctcttcctccgggtacttagatgtttcagttccccgggtctgcctctcgacatcctatgtgttcagatgtcagtaccatcccattacggatggtgggttcccccattcggaaatctccggatcgaagcttacttacagctccccgaagcctatcgcggttcgtcgcgtccttcatcggctcctagtgccaaggcattcaccgtgcgccctttctaacttatcctttttnnnnnnnnnnnnnnnnnnnnnnnnnnnnnnnnnnnnnnnnnnnnnnnnnnnnnnnnnnnnnnnnnnnnnnnnnnnnnnnnnnnnnnnnnnnnnnnnnnnncccattcggaaatctccggatcaaagcttacttacagctccccgaagcctatcgcggttcgtcgcgtccttcatcggctcctagtgccaaggcattcaccgtgcgccctttctaacttatccttttttgcttcagatcagcggcggatctcttcgtccacttacgttattctcactcggtcacgtacactcgtacgctccccccttcgaaaacgtgtgtcctcgatctccttgctgctcttcgcaaaaattaaaaaatacataaaaaggtatgcattgaattcttgacgtctcgttcaaacagttatacaaccgatgaacaaagatcaatttgagttatttctggatttagttttcaaagaacctgagagagtaagtcctctcaaaactgaacaacagcacaagcgtcaaacaacaaaagttgtttgtcgactagagtaaaaactccatagaaaggaggtgatccagccgcaccttccgatacggctaccttgttacgacttcaccccaatcatttgtcccaccttaggcggctggctccaaaaggttgcctcaaatctccggatcgaagcttacttacagctccccgaagcctatcgcggttcgtcgcgtccttcatcggctcctagtgccaaggcattcaccgtgcgccctttctaacttatccttttttgcttcagataaccttcgtatctcttcgtctggttcatgtttctcagtcggtcacgtacctttgtacgctccctccttcgaacatttcccatcctcgatctactcggttctcttcgcaaaaatgttattctcactcggtcacgtacactcgtacgctccctccttcgaaaacgtgtgtcctcgatctccttgctgctcttcgcaaaaattaaaaaatacataaaaaggtatgcattgaattcttgacgtctcgttaaaacagttatacaaccgatgaacaaagatcaannnnnnnnnnnnnnnnnnnnnnnnnnnnnnnnnnnnnnnnnnnnnnnnnnnnnnnnnnnnnnnnnnnnnnnnnnnnnnnnnnnnnnnnnnnnnnnnnnnngaccagaaggtcatacatcgactagagtaaaaactccatagaaaggaggtgatccagccgcaccttccgatacggctaccttgttacgacttcaccccaatcatttgtcccaccttaggcggctggctccaaaaggttgcctcaaagcgctatatgaccagaaggtcatacatcgactagagtaaaaactccatagaaaggaggtgatccagccgcaccttccgatacggctaccttgttacgacttcaccccaatcatttgtcccaccttaggcggctggctcgactagagtaaaaactccatagaaaggaggtgatccagccgcaccttccgatacggctaccttgttacgacttcaccccaatcatttgtcccaccttaggcggctggctccaaaaggttgcctcaccgacttcgggtgttacaaactctcgtggtgtgacgggcggtgtgtacaagacccgggaacgtattcaccgcggcatgctgatccgcgattactagcaattccggcttcatgcaggcgagttgcagcctgcaatccgaactgagaatggctttatgggattggcttcacctcgcggtttcgctgccctttgtaccatccattgtagcacgtgtgtagcccaggtcataaggggcatgatgatttgacgtcatccccaccttcctccggtttgtcaccggcagtcaccttagagtgcccaacttaatgctggcaactaagatcaagggttgcgctcgttgcgggacttaacccaacatctcacgacacgagctgacgacaaccatgcaccacctgtcactttgcccccgaaggggaagcccaatctcttgggtggtcaaaggatgtcaagacctggtaaggttcttcgcgttgcttcgaattaaaccacatgctccactgcttgtgcgggtccccgtcaattcctttgagtttcagccttgcggccgtactccccaggcggagtgcttaatgtgttaacttcggcactacgggcatcgaaacccctaacacctagcactcatcgtttacggcgtggactaccagggtatctaatcctgtttgctccccacgctttcgcgcctcagcgtcagttacagaccagagagtcgccttcgccactggtgttcctccacatctctacgcatttcaccgctacacgtggaattccactctcctcttctgcactcaagctccccagtttccaatggccgctcggggttgagccccgagatttcacatcagacttaagaagccgcctgcgcgcgctttacgcccaataattccggacaacgcttgccacctacgtattaccgcggctgctggcacgtagttagccgtggctttctggtgaggtaccgtcaaggtaccgccctattcgaacggtaccgcttcttccctcacaacagagctttacgacccgaaggccttcctcactcacgcggcgttgctccgtcagactttcgtccattgcggaagattccctactgctgcctcccgtaggagtctgggccgtgtctcagtcccagtgtggccgatcaccctctcaggtcggctacgcatcgttgccttggtaagccgttaccttaccaactagctaatgcgccgcgggcccatcccctagtgatagccgaagccatctttcaccctctctccaggtggannnnnnnnnntcgccaatctatgcgggacatctcgagaagtggtcaatcgcatgctcgctgagttgcgaaaaaacgaagtgatttcaatggcagatggaaaaatcatcattcataagctttcttttttaaagaaagaaatagactgtgaggactgccctgtggaattgtgcagaattgaataagaaaaaaagccatcgttgatggcttttttcttattgaacacctaatgcaattttagcgtagcgcgtcatgcgatctttatcccatggcggattaaatgtgatattcacttctacattttctacttcttcaagcgaaattaattgttttttcacttgttcgccaatcacaccagccagcgggcagccgatagaagttaacgtcatcgtcacgataaccgtgttgttttcttccatttctacaccgtacactaagcctaaatttacgatatcaacgccaagctctggatnnnnnnnnnncatacagatcgttcaaacagtcccgcataaaatgttcatattgcgggttttcgcggttatgcattaaaataatcggaacatcgtactgtgcggctacatcggcgatttccggatcccgttttgccccccatacatcattgatgatatgtgcgcccgcttttattgcttcttccgcagttctcgctttatacgtatcaacagaaagcggcgcctggacttttcctgccacagaatgaatgaccggcaagattctgtccagttcttcctccgctgatatcggctgatgccccggccttgtcgactctccgccaatatcgagcagatcggcaccgtcctgtaccatctgatacgcatgttccaccgctttttcaggctgaaaaaaattccctccgtccgaaaaagagtcgggcgttacatttaatannnnnnnnnnaattaattggggcacaggaaaaatatactggtttaaccgtaaaacagcatattgcaaaaaacacaaatgaatatttatatcagtttaaagaagaccccaagcagttcgctcaaggcaagcctatagtaacgtttacaggtagctgtcacggaatagtatcaggtaaactggctcgaagatctgatgaaaagaaatttgaagaacggttcggtaaaatcgacaaacaaggggttagattagtaattgacgacaaaaatgatggacctcttattagtttcgctgaggattttttatcgtgttatcttgtagacgtgatgctaataaacaaccaatcggaagtttatagagtcaaagatattttatcaatgatgattgtaagccataattatagcaagagaaatttaacnnnnnnnnnnatctctatgttataataagggtaataaatagaaaaggagggcgttcttatcatgcaaagactagctgaacacgtcatagctgtagctaacaataatcaacaagacgtgacgaacttacaattgcaaaaggctatgtttattactttaggtttgcacctacgtgaacaaaatggcattgatgatttggccaggcaacttgatagtgaggcgtcttttgcaagatggaaatatggccctgtcgtggaaagtgaatattataaatacaaccggtttggctcaagacctattgaaaatccatttgcaagtcaagttacagaacttgactaccttaataataatataattagactgcttgaaatggatccttttgcacttgtacaatttactcacgagctaaggtcttgggagaaatacgaaagggaaatattggaaggtaaatatgtcccccattacactttggaagaaattttcgaggatttcagaaatgaaagataactcccgaagctttttgtctaaattagttgcataccttaacgcagttgatggggatataatgggagaagagtcctctaatgaggactcttcattacatgaagatattaatccgattgaaaatctagagaaaactctaaaggaaataggcgaagtttcaagtttaaaaattaactttagaaaaggtacagttaaagccgaaaaagagtttaaagaattaattgatagccttaaaacaacaattgatagggataaaattccttactcaaaaataacagatacactttttaatgtagtgaaaaacgaagagtttttagatttaataggagatacaatacaaaagaattgggaacactacgaactaaattataaaccggatgaggatttgcgtcacaaattttttaaattaaatgagcatatctctctttcggttatccaaagaactcatataaatgatcgcctaaagtccaagatagaagaagtagaagggcaattaagatcttttaaaaaacaagtggaacgatataagaaggaacttgacgaggtaagggaagaagctcagtcaaaaacaaatagcatgattacacaatttattggcatacttggtatattctctgctgtcttaatgggtgccttcggttcaattcaaggttttactagtctttttaacaatgctaataatatacnnnnnnnnnngatcaatgtcgaaactgccagcataacgaatatttgttttttttttacaagcagaagacggcatacgagatccgcctcggtctggtgggcgcggaatgtatataagagacagaattatcttttagtaaccatagcgataataagaaatgttgaaaataacctctaaaactctgtactaaatgataagggttttcattatctattagcatcctttgaataattacaggctttttgataatagagtcataataaattgaaccaactgtcataaatgtattttcattacctatttcttcaagtctatttgagttatgaatgatactaaagtcaccatcaactactatatcttcctccaaaattgctttatttaaaacacaaaatatacttatcaaaatttaatcactcctagattttattaactaaattataaatcctaggagttcttacgtgnnnnnnnnnnattgtaattctattaattcctttgaatctactggaactaattgatcaagtaataaattatctctataatggattttaaatttatcctgcaaattttgtttcatttgttcgatcactaaagaactctcatcatccttatctttagttacattaagtcgtcttgggagttctattctattagtagcaatttcatgagtaatccccattctgattaattgatagtacattgtattaacgatatctgttaccttcattctttttaactttgttttattaactcctaccgctttaaaactaaccatatcagaacttttaagaatcaagttgaagaactctttatatgctctatattcactttctgacctattatccatttctttaaaatggaattcactcggtaatttcttatcttgttcattgctccactttaggaaactcgcttgtaaccttgccatcctctggggttctaaaaaccaaaccccacctacaattatgtaatctgctgtttttccggtttcgtcagcaaagatattcattattttatgagtcggcttctccaaaagttgagcttccttctcttggtcagccttcgctcttcttctattcctagttccagtgtccgcaagaaaaagtttatattcattttgaatctttgcccttgccctagcaattgatgtaagcctttcatacttatataagttctctaaagagacgctatttccagttaaaccattataactttgccaatatctaatttgcaaagttatgtctgaatttcttgtttcagggtacttatttaaaatcattgccactctagttgttaaatgtttagtctcttcattttgaacagccttccacagcgcctgagctttcttaaccctttcctcctcttttttcttcttttcttcaccctcctcttcattaacatcatttaatacttcttcatccatttcatttagtaaaaattcatccgactctttaagtannnnnnnnnncccttattataacatagagattttaaattgtattaataaacgcatgtctctataaaattatgccaatatcactcattgcacaaaggatttctagctaatatcattaaaacctgtttactaattaattttaattcgtttatcattattagattatcctgctataatggaacataaattagctttacaattttttaacactttctcaatttttttctacgacaatttaaaaatgaggtgaaacaaattgaaagatattatttatctagatgttgatctaatgaattctatgcttgcacaattagaaaacggcctatccactacttactctagagagggctcctctcaaagagaacaagcttctactattacttctggagatgaattaagctctggactaaacgctggcatttcactttcttccggtgcctttccaggtggatcgctcaatctaggtactagattaggaggaaaaggatcggaaacgaatagtgaaactgactctttaactgagggacaaagagacatactcaataaacaattccatgactttgctttagataagctcttatatttgttaaaagaggaaggaatgttatccactacagaatctgcttcagaaggctctttaatattggctgatgagccattcagattctatgattttaatttaataaaaagcgcgaacgacccagaactatttgaatccgtggctcttggagaggcaaacttattagacttaagttatcaggaagcacaaaaaattgttacaaagacaaagccaaatgcgcaagaacgtaaaaaaatgagtgaagcagaattcattgttaactcacacaaagagttagagcctacgatcaaattgtttaagcaactatacaaactcaatacttatgcaaataacttattacctaatcttgttttaataaaaacaggtaacaaaaaaatcggcttgctaaaagaagataatttaagacattcaacagcttctctttcttttagaactaatatatcaagaaatgctcgctttctagttagagtgattggcaggaaagagactgtgatggtcgatggagcattaaaaaaattaccaaatatgtcggaagaagatcttgacagattgcctacttacatacttgacatcctacttggttcttttaaaattattgaaaaaaatgatttagtggtaacaccgatagctattttttacgaataaactttaattcatcctgaacagatttttttcttttctcaaactctgttgttttttgagacagagattggcgaatcgaattccgtaaagaagcgttacttttttttctctttttaaaatcagcggtctgttggttaagtataatcgaagcatcttcaaatatgttcctcttcattctttgtacctcccatcatacttacgaatagtatattcagcaaatacgcaaacagtcaataatttaggcataccttagtatagactgaaaaagtgattgcatctctgcctatattctgccaaaaaaatccctgctgtagcagggccttttttaattgacaaccttgtccaacgcttttcgagtattagaaacataaatgccaccaactgctcttggcaagtgaactttctggaatcgctttaccgcccctgaaaaatgcagcatttaacgctgtctgcaattgccgtacagcagtccctttgctcccgcgttttaatataatattaggtagtgggtatttctttgctggcttgctggcttgtttgctgttggatacgggcttcttattactttcgatcgctgcccaagtagccggacctacaattccatcggcagataatcctcgcgatttctgatactcgatgacagcagtctttgttttctaccaaacaagccatcatcacttacaccgacagcacgctgaacttgcttaacatcatccccacgcatcattggactttgcagtaacatacgcttgttagaattatcattgcttccgctaggcttaattattgcagttcctaagttaattttttgaccgacttttagtttcgcatgatcaactttagggttcgctttctttaagtcatcaacgctcatgcctggaatttctttagcgatactccagaatgtatcaccttcttgaataacgtaagtatctggagtattggttgacagtataggatctcttacattagtgccgtttataacagctcgatagtcgaactcagggcataatttacatgcatatcccggaaattcattatgcactcgcgtacgtttgtaattaggtaaatctttttttaaggctgcaaccaacacggacaagctttgtttttgcgcttctgtaggtttttgcttacggaaatcacctacaaggcaaataccaacggcaatacgattgctgtttccgacatggtagcttcttacacctaagttgtggttccattcaatggttccgtctttgcgaataacaaaatggtaagcaactcccggccatccatgctcattaacatgaaagtttgcgaaagaagcagaacttccctctgtagatagggaatggtggatggcaatgtccgttttagccgcaattccgttattgagatagctacctttctttttagtttttccacgtaaatcaacgagttttggtaccttcctaaaatggctcatttattgttacctcccttagtagtccctgtgcgttctttaactagctcaaaaagccctgtagctgataatcctgcaaatccgcctgcccatagtcgcaagacaatgtctaaatccgtaaaaggcgatgcagctgcacctactagcaacccaatgaccaaagtgatcagcggcaataagttgactggcaagtccaccgtcttcttgaccagctccatcagtgctaacacaataggagccagcaccgttgcaaacaacaaaacttctttcattcgatcatttcctcaataaaaaatccctcgctgagtctcacagcgagggtttatatatatttgcatataaaacagcaaatcataatctagttgtcaacaataaacaagtgatgataaagatatttataactatcttcttttttatattgggaaacttaattttctaagttgggaaaattacataatactgacaaatcgcttatacctttgttattattaagaaaaatagaatttttcaggagggcggtcttttttatggcgaaaacaatgagctctgaatcaattggggcacggattgtggaatggtatagttgtattatttcgcgttcagtaaatcaagctattttgcatagagaaaaagcaaaacaattattagaaactacgaaatgcgatgataaaatcgttgcgtatttccagttagttgactttcgacatcaaatgatgatgaaactaaacagcaaaaatgaacttgcaaatttaaaagttgaaaagagctttgaaccttcaatagacgacatgctcaagtacctttactatttcataagtggacaaaacgaatacatcaatgaacgctacagatcagcgatcaagctattcaggaaagcggaacgtttattagagtatgtacaagacgacgctgaagaagctgagttttatcaatatacaggattggtttactatcgcttaaaccaataccttgtcgcgtcttcatatatggaacaagcggaaaccatttttaaccgactagggtacatagaaagagctataaatactagacttatcttgggactgatttattccgagttgggaaactacgaaaaaggagatcaaatcatccaggaggctctagcctcatctcactctttcccccttacaaacgctcttgctttacgttcgcttggtctaagcaagcaacgtcaacaaaagtttaatgaagcagagaaacattttagccaagcacttaaaatacctgaacacaaaaatagccaggcaggagcaaaaacaagatacaacttagcaaacgtactttttaggcaggaaaaacacgggtccgcaactaaacatttgcaaatggcagaagcaggggcgaagtattatcaaaatttcgagtacacaaacaggtgtctgttttctcgcggtttgtattgcgatgaagattttctagtagtcgatcaggctatcaataacttacaggagaacgctatgttttttgaaacatttgaactagcagaggaagcggcttactttgcggaaaaagcaggaaacacggagatggccttgaagtatatgaaaagtgccagtcaagcttgtttaaaattcaatcatttaggagatgaccaaaaatgaaaaaagtattcactttctttttgctttcagtcattttgacatttggtgtagcaccatcatcaaatgcaccggatgaaataattagtactagagataaaggagaaatcactccgtaaacaaaactctatttacattaaataggtatctccgtgctaagataggcggggctttttttattacagtagagcacaccacgtattttgctgggcctaccttcacgaatttctttcttcgaaatagttgaacactattaaagattcttttatgcttaatacatagaaaaagaaggatacgatcaaggacttggactaaaatatcctccgattaaaaagaaaggagcatagccgatgaaaaggtacgttgcctctgattttttctctgcccttgataaaatagactcggacatggatcagtacacagagacattgaacaacgttcattctgctattcaaggtgtcgtcaacttaggagataaccttacagggcaaggtggagaagcactcaaaaacttttacgccaacaaccatgtgccgctactttcctactggacgatggcattccaacaagtcaaaatggctacggcaaaaatgcgtatgtatgcgctaagctttgagagcagcgatgcagtcatcgatgaagctttcatcgaaggagaagtcatcccacaattagaaaaaaaccagcaaagaatccaagagcgtgaagacaatattaatagtattattgatagcgtctcggatattgtatctttacctagaattgacacaagtgccgtacaagaagggattcacgatgcaaagcagcacgcaatgaatacggttgaaaagctctatgctttcgaccatgcgcaatcagcagcagttgaccaactcatttcgttgatggccccaattagctcgtttattgccggcttaaatggggcgattgaatcaggtgttagcattacgacacttgccggctacattgcttcccaagatgtgccggaagaaataaaagcgatgcatccgatgctaaacagcacgtacagtgttttaaacccgtataatgactttaaagaccaagccgtacatacgcagaatttcttgctttcaccaaatccgtttggatttattcacttcagcaacccgttcattgcaaacgtcgctcagcgattttatttggcgagcgggaatattgacgtggttcatcattactcgccaaaccatcagattgcaggtacagtagtggatgcaaacggaaatgagattgcatcttctgcttacacagttgacgctgaaattattaatgattggggcaatggtcatattgaggttcgtggcggaaaagtggactatgatgcattagaggaacaaggaattattcctaacagatttgttactaactcggggcattccatacactacacggatattgatggggagcttgttatatttatggatgatcctgatgtgcattattatacgaatgctcacaagcaaacaagggtaaataacttattagctcatgtaactcttgtgaatctcgggcttgttggagcccatatagggtttacacaggcagttaaaaaagcgaacgggtctaaggttacaatagagaaaaaaccacctactgtagctggtgaagccaaaaaatatgttttcggcacttccggtttattatcaggtgtcccaatagttaccactcctatcccttccgctgggacagaagaaaggattctctggattagcaccgatgaagggcaaacatgggacactagaatctatgtacaagttgataaaaacggtaaagcaacaatgacggattatgaagatagaacaccagaagggccaattgggtggctctatgaaaagacaataaagcaatggattggggattcatgaaaaatataaatggaaaagaaatcaaattaagccgaaaaaacaagcttgttgcttttgttctattgccgctttatatgattgctgtctttctcataggctatacagtgggccttgaaatagctagcaaatggtatgattcaatggcgatcgttgcattcatattagtggtacttgtgctttgtatcatactaggtcccattttcaacgcgtttgacttctatgacatatatgtggtgaatggggaattaagcctaaaggaaaaaatgaagaagtttaaagcggtttatataacattcactcttttttctgttattttaggcttatggatagggatattttaacttgatctacaatggtgaatcataaaagtcgttagctgcgagtcttgtgactagtaaacaagccccccgctatagcacggggcttgttttatttagcctgaaatctttttaagcaactctatattttgggcagctgtgccttcatagttcttaatcccatattgttgagccagctttgcgcgattggcgtaagagctatccatgcccacacgcttcatgtaatcaacaataccctcgccgctttttggcttaggtttgctgtttgttgtttttgccgcgcccccaccgcgcaatatgtttagcagctgagtgttttgggcagctgtgccttcataattcttaattccgttagtagcagcaagtttagccctattagaaaaagaactgtccacattaatggatttaaggtaatcaactaaactggtcgtcttttgatcgccttttggtgcagttggtttaggcttgtttgcaccaggcttgctagccccacctttgcgctgcaaattaaacgcttgcgccaatccatctacatgaccacgagctgcacgagtcaaaaaggctggatctttgagcttggccgcatcgttggcgttatcaataaaaagtacctccgttaaaatggccggcatttttgaagtccgcaacaccgcaaaattagcgtttttctttcctcgatccgttccgccgatttgttgcataatcgccgggtggataatattttgcgcccgaaccgatccactcgattgcgatgtatgaacaaacgattcaaagccagttccgcctcctgcattgatatgcaccgatagaaaataatcagcgccccagttatttgccatgttggtacgttcggtcagagatagagtcgtatcgcctgttcggctcatccgcacttccacattttcatattcagtcactaacatatcgcgaatttgcctcgaaatcgaaagcgttaaattcttctcttgcatgccattccctaccgcacctggatcgctgccgccgtgtcctggatcgatgaagattttagtcattattgttttcccccttttgttgtacctacacgatctttaactagttcaaaaagccctgtagccgacaatcctgcaaatccgcctgcccatagtcgcaagacaatgtctaaatccgtaaaaggcgatgcggctgcacctactagcaacccaataaccaaagcgatcagcggcaataagttgactggcaagtccaccgtcttcttgaccagctccaccagcgctaacacaataggagccagcaccgttgcaaacaacaaaacttcttccattcgatcatctcctcataaaaaatccctcgctgagtctcacagcgagggttcatatatttgcatataaaagagcaatcgccccgctaataattgcggtgatgattgctcctgtgatcgtcctttttatccatcttgtgttctcttcaattgtccctagggtccggttaattgaactgatttgctctgagtgttgtaccgtttgggtctttaatttaataacatccttttcaagagattttacatctgattttagctctaaaatctctttttcgtggtaatccactcttttaacctcctgctgcattgtccctctcctctgtgtctttattgggagcatactgatgcttacccggcacttttttcacaaaaaaagatagacgctttcctgcgcctacctctcttcattcaaaaatttaacatatcttgtgtaccgaagtgcttctaagatcattgagtattcattatcggatatgaataatgactttaaatatccacccccatcactatttatttaaagatttatttatatacattgaatacagtgtatcgaaatcgattattctgtaacgatcttttaaatgccttgatgcctccctaatatgttcactgtttaagttttcgtaattccctacgatgagatataataacgggttatccatccgaactttatattctttatatgcccaatcaatatttttactgaatgtgaaatattcgtcatagttagctaactgggctaatccttcatcaatataatcatggaaccgtcttcttttatgcccaccttgagtgagattttttttatcaagcttaggtgtttttaaatcacatatatcatatagtccgtcagatcttttaattaataaatctggatttatagacttttccaaagggtctgggtttccttctaaccaaaggaattccttttcatatagaaaatcactacattcaaaagccgattttagaaaactaccatttaatttgatgaactctccaattgaagtctcgcgcaaccctggaannnnnnnnnnatgaaatgctttgtcagcgtcacgaagtacaccctatgtatccaagtgactttgctagcactctagaaacattatctcttcctgaaatgcgtaaagctattcatcaccttcttgatattcgagatgaaaatgtgtggatgctattcggtacgttaccgttttatgcatgcagtaataatgaggaagacttatcgcttttacagcgtttgtttagcagtaaaaatgtaaccgttcgaaacgatccagacgggcgctctcgcctaaatgtaaatattttcgacggagatattatcgtaacggattttggtgatacgcctcctcttggcaacattcaagatacaaagcttacagacgcttttgatatgtggcagcaaagcacgatttctaaagaacttagctgtcattgttcagcagnnnnnnnnnntttagattgacattttcccattttgccttccgaatcgtaaaacgtcccaagccgactaagtttcaaacggtggggccccgaccccttccgtttgaaactaagacggctagcaagcccgtcaaggggcaaaaaagtttttgctacttaaaaccaaagaggtagcaaaaactttttcgcggagacccttgacgggcttgctatgggcgtttttcgttctccatgccaaagggaaaaaataatcccctttggggacatctttcgcttcgcaaggcaaaaagcgaaaaacaaaattcaaaggaggagaaagcatgagtctaaaggagaaaattgaaacaaaacgtaaacaaatggctgatttagtgcgaaagaatggggttgcttcaaaggaagttctgaaggcatcacaggaattagacactttaatcaatcaagctatgagagaagggatgatgaagcaatgaatgttttagtcaaagaatggcgtaaaatggaagcacaggagaagttacgtttaatttgccgtaaggctgcagaaaactccaccagatggttaaaaaaataacaaaaaacacttccttttttagtgtctaagtggtataattaaattaagttaaaggatcaccgacaaatacagtctgtcggattgtaacatgtaaaaacacaagcacaaggagagatgaatatgaaaaaaaatgcagtcaaattctacgaggtagaaaactttaggttttataggttgccgtcacctattagtgtggcaccggacggttggaagtttgaaccaacccgatatgcactactatccaacacgacagataaacgagcaatttttctaatgaattttaacaggggttatagtgaggttgatctaattaatgacgttgtaggttgcattaaaatacacaaaataatccatgaggcagatgtttctaaagatgaccaacaactcatttctgagctgttagagattaacggttactaaaaataacgccacccgccgggcgaaagcggcgggatttgaaaggagattggaaatgaactaaaattgaagaccaagtacgctcttctgataccatcatacatacagtagaattagtatatttaagtgaaggagtgagtttattatgaaactaatcctagctttattaaaattaattgaaatcttttttatttacgttattccacttggattagcaccgagtttgatccttgtaaatgtgacgctcaaccgggtctatgggttaaaaatatacgctgtagaattgctgctattgttttcagtgtctatattgattggctatgcagtcggtagcgcaagagatgaatataagaagcatctatatcgtgtatattgtaaaaaaaggggaattgatcctaaaaagttatcaagttggaatgattggaaatacaatcaaatattagagaaaaagtccgactgaacttttttataaccaacattatgtcaagccaatgaacattcaggttcgaggatgacaataatccgaagtttttatcatcgctttgtaaggaggcataaaaatgtttgaagtgttttttgatgacgtattaaactcatgggttatggccaaatccatttgtcggatgtgtggttcctatacagaatttgattcgtttgaaagtgaggaagaagcattaaatgcagcgtctgagaaaacgaaactaggcgaaagggtagacgtgattatttgcgaggaatgctttatggaaaacatgtattaagttaaaataaggtatataaggaaaggaagagaaatgaatcgaattataatagttttcttgttcgccattgttttggcgggatgtgaaggaacctttgacgcagaaaaaggcgaaaccactcaaggaggggaacttcttcagggagtagttacaaaagtgaccgacggagacaccttcacagtcgaattaaatggagttgaagagaaagttcgaccaatattggttgatgctccggaaatttgtcatcggaacagtccaaaggactgtgaagctgagccgtttggtgatgaagcgacaatatttgcggaagaacttttacttgatgaaatcgtatatttagagccggatgtttcagaacgtgatcggtacgataggatgttattttacgtttatttggaggatggacggatgtttcaagaactattgctagcagagggtctagcagaagttgctgtatttgagccagacataaaatatatggacgagttttttaagatacaagaacaagcacagaaagaaaaagtaggtatttgggaatgacatattttgaagatcaaaaaggaggaaactatggaattcatattctcagagcgtccaaacaatatcttttacggcgatatatgtaagattaatggacaaggttgtctgatctttggttttggcaagtcagaggctgcccaaatagcgtcctctgacaatatgattgcttatgatatggcgtgtcttacaagagatgatgaggggactttatatggtcactttgaaatggaagctcgtgcaaagggaatcgatgatccgataaaagagagaattgaaattaagaactttttaagaatgcttgatcaggaagaaacacagaggttgctcgatttaaaccctcatttgaaagcaatcgatggtttagttgaaataccgtatgatgcctttgttgcgtcatgcacatacaatattacttttacagccccggctgatttcccattcagacccgaaggtttgcctgaaatagaaagagatcctcaaaagaggataaaacactttattaagttgtcaaaggattcaaacgttcgttcttttgtggtaccgtggacagacaccgtggaggaaaaagctgtactgattaaagatgctttgattcaaaagaaatgacatgaagaggagtgaaaagataacgcaaagtaaacccctgactttaggtgtcaggggtctatttttatgatttaattaattccggtacaataactcaataattcaagagggtattttcttacattactaaagagggcaagtgttcacctctggcatacgctattcatcccctatttttccattggattacgaacttatattcatatataataagaacaaacgttcttataaagggtggatgcaatgaaaaatatggatgatgtcaagaacaaattataccgtggtaatttgctatgggaaggcatgagaatgatgctccctgaacacaaggaaaaattgattcaacaagaaagggatgattggaaagttgaactgcatggtgagctagacgtcgatcagtggcgcgaaatcggcgaagttgtcatggacgcgcttaatcatacattgactgtccgactgacgtactggcaggatggttactatgtagaacgtgaatgttatatatacaaagtagatgatataggcaagcgtgtacggattgagtatggcccaactgacgacagcataagggaatggatagacatgcgggtcatatatgatgtacagcgtgtataggttttggatttaacaaaatgaccctgcttttcaaagtggggttttattttgcactttacacaccattaatatcatggtattattagcgttcaaacacacggtgactggaggactcaaattgaaatttatttctcatataactttgaatacgggacatgttcgcaaaacctatccgaatgaagtagacaaaagcctattttttagactgaaccgtatatacaaggagtcttttgaaaaagatggagcaatactctttgatgaatacttagtcaagggtactaagtttgagggcggctccattttaaccctatattcagatgacggtctacttccgattttgacaacagcatctagcaagcacaagcatactgagctttgggagactctacacagtagtgcgactgtaccgctcgctactcaagctactaaccctgctgacggtccgtttattgttgaccgcctagaaattggggcaatgactaatatggacatattaaaatggacaggcgacttcagtcgctgcatgggatgggcgtcattaaatccacggaaaatacgttgaagaggtgttttatatgaccgtagaggaatggaaagagtttacggaaaaatacattatgacaaaatccgaagttagagaattcatcggtaatgtgtcaggtgatagcatctggccagaaagctcctttcgccaagcgcttgaatcaggacgcattaaaccgatttacaatttcgataaaggaaaagggccagggacaatccgtcttttttaccggccggaaatagaaaaatacaaaaagaatatgcgtagaaattagtattaacgttgatttatcaagcagctcacaaatgtggggtgctttttttaaaagttttaaaaacccctttacacactattactatcatgatattattagtgtacaagataaaacaaaccaaccaaggttgcaaaagaagggatgaaagaaatggaaaaaatgactcggaaagaatttaaagaggaactattgtattatatgatggacgtaacggaaaaaatcgaagcagctttgattaaattaggagaggagtctccggaagaagtaagacagcttatcgacccgtacacaaagtacgtgtcaatagatttcgagtgtcaaggttatagcctaaggtatgagggtctcggcgatctcggatcgctgtacaaaagtgttgagtcggaaagagatgaacacaaaaaagattggatttttcaaaggctactatacattggggacaagggaccaaaaaccaatttataagcgtctacctcgattattggtacccgccgtgcatagctgcgggacttgaaaggagaactaaacttggaagaaatgttaatagtaaccgtacgagacatagagtatgtcctccaatcagagccacgtcctacaggggacgtgactccagacgggaagatcgcgtatgaagcaaatgcccaaacaattgacggccaccccgcaatggtttattggaccgtggccgagggagagaaactagtattagaaacgcctatatttgcagaattagtttaagtaaaacttatagaaatcgggtttttgtaacaaaaagatttccaagctcaagcttggtttgcagccttaaggctgtttttttatccaggatggaaaccaaaccaacaagcccatttgggcggcagcactacagactgatcggaaagcatacttcgctttccgtcattctgtacgtgtcgcttcggcactaaatgactcgataaccacggcctgtaagctnnnnnnnnnnagcatggtatgataatatattcccataagtttcaaacattttcttcttactttcggatagagattttctagtaaacggtttttcctcaattgaattaccaatattaatataaaatttttccttgttcgtcattaatatggattctactttgtttacttttttttctttcactacttttaggtctttttgtggtttatcccatctattttttttatttttcaacctgagacaaataatatttccgcttaaatccttagtcaatcttcctgcacgacccgctaaattccaaaaatccacatcagaaaatttcctaagtccaatagcattacttaaaataaaaatattcttagcaggtaagttgacaccttctagaagagtagaagtacaaaaaatatgctcaatatctttattacgaaataaaacctcaattttttcccttatcctttggggcaagccaccgaaatgaaaagcaatacctttttttaaacaatcgactaaataatattcttcatgcatagttgttctaactaaatcaattaagcaatccaaattaggattggacttagcttctagattctgggcaaagtttagtgcatagcctattgtgtcatcaacagtattacaataaataatattttgtacttctcttcccagaatggttattgcattttttagactttcatgctcatttgtattaaaagagtcgtatgggatatcaatttcttcaccgttttcagtgaacattactgctttattttctacacagtcaatgaaaaatctattttgtgcaacagaactttctgtcacacttaatgtatcatcagtgctatttccaaataattgtaagaaaatttcgctattcttgatgtttggagatgaaaagtacaagttgatactcttcctttttgccaacattaaagcatggtaaaatagtggtgcccttgaatcattttcggttaggagtttttgtgcttcatcaacaaacacatagttaattgctggattatcatttgacaaataagaaattaatctttcaggtgtaaatacaaaaatatacttgctacctttatttctaaataaaagtggtacagttggatgggacaaaatcttgtatttactaactagaatttcttttttaagtttatttttaacctggtttattagagctctagtaggtactagaataactatattatcagaagcatttctttctttaattaagtgtttaataaatgattcgataataaaagattttccaaaagaagtcggacctgaaaaactgaaatgattactgtcttttaattcttcgaaaactttatattgagcatcagtaaatatannnnnnnnnntaactcctctattccactgtacagattttttgctttatccaaaattgaactcgatgaaaatataatcctcttccccatattaacctccaattagttggtcatatatatcattagcattattaaacggcacagcacttccacttaataaaagctttcttactcctgatgacatgtttgccatttcctcaaagggacagaaaataatctttttttgtttataagcaaacctggcagtatgcattgttccactatgctcatctgcttcaaaaacaacaaccaaatcggataaaccagaaacaattctgttgcgctcgacaaaatttttctttttaggactttcccctaatggatattcggaaattaataacccgtcttttttaattatttcttcggctaattttttattgctttttggatatacttgatcaagtccatgtgccagtaccgcaatagtttttccgtctacatctaagcatgccttatgactcaaactatctacaccgttagcaagcccacttactattacaacttgttttcgtgataagttactaattgtctccttaattttatctctagttgaatgactaggttttcttgtaccaacagctgcaatatttctttgagattgtaatagatttaaattcccctttgcaaaaattacaattggtttattttcattatcaatcttttttaatttctctgggtataagtcttcgtatattgatattatttttatcccatttttttcactctcttcaattatttcgtttaccctattgtaaatatcgattacgtaagatttattaattaattttttatccagtttactcccagagtatcctcgctcaaacaatagttgtaaagaatcctccctaaatagcttagttatctcttcagagctaaaatccttgagaattttattaataaggctattctctaatcccaagtatttcaatgttagaatttgatcaatcatctcaacacttccgtttcaagtcacttggaactattataacttatcattaatattaaatgtaactttatgtttattttttagtttcccttaaacacccaaatttaatatgtcaaacggcttttatagcgttcgttttaaaagttatttttataaaattgataaaccaccctataataacttccactagaaacagtaataagagttctcccttacctattagtggcaaccgtaccacaaaaaaagccctcttacccggcaaaggcaaaaaggctgcatgatgtttgttccctaatcttttttttggcacggtccaattgattttggacgctcgttttttttacattcctgtattttgcaatttgtcctagcgacaaattccgtgcatagtgcattaaaaagatttctttttcattctccgtcaatacagatagcgcatcctcaatgcgcaatcgatctctttcagacagccccgaataatctactttatcggcaaatgccggttcttcgtatttcgcataaatttcaagggcatctgggtccatatgataggtgagctggtatacggaccgtctatcaatgtccctttttgccccaggacgacggcccgtttcaatccattcaatgacatgttctaaatctgtaataataccgccaacaatttcagattcagcttttttctcaggagtagaaaggggctttaaaccatcatagtaagccctaaccacacgcaattggtccttataggatttaagcagaaagtacatatcttgcatatcgaaccctccctttttatcgctgacggtaagccccgccgcgtgaacgcgaataaacagcgcgatttacacccatgagttctttaacatcgcgagtagatagagaatttgacgcctttctctttcgttttcgcttcttgggcgttttcttttttgtcggcaccggatgcccattcaaccggcaccactcttccagttgatcctgaaacatactgcaatcactcctttttgcataaaaaagaggacactgaaacacggtttataccgtattaatcagtgtcctccagtaggctggtgggatctcactcactaaactattgtcaagtatgattccctcacattacttagattaccaattgaataattttcaataataagagggaccgtattcatttttaaagttcttccaatcagatcttttatctctagttgaatataaccaatcactttatccgcatttttaggtcttaggtcaatagtaagtccaacgtactctgtagtttttactactttttcgtttttcttattttgtgttattacaccgctattattttgataacttaactcaacacaatccatagtgaaatttacagattgaacatgatgatacacgtggttagagttttcaattacaactcttactattttatcgtggtaaaaatcttgtatttttattaccttcataattggcaaatgagttgtttcccattgaatttgttggttcttaatactttttctagttaacgatatattgtaaaaagacaatatagcagctactcctgcaattattgctaaggttagctgaattatgtcacttacattcaaaattcctccccctcttcaaatcgcaatctcttcactttattttgatgtgtaatcacaaccgtctctccataagcaggaagttcagcaatttttgccttgcctcctcccacaacgatcaaacaggggccttccagttctaaagtatctaattccattctaccagattcaagatcaattggtaagtctttcagacgcatatacgttcccccctacaggtttaacccgcaattgaatcctcctgtaatttcaaatcggaaatgtcgaccttatactctatggccaaatcttttacaaccgctaaatatatttctgttaaacgggcatcatcggcaatcacatccaggcgatttttagccgcaattttagattttgacacgccttcatacgccatttttcgctgcttatttaccagcctgattgataaatcacatctggcccgttcctccagacgatcataactgatgttacgtgcagcacgctgtccctctgagcctccaatcacataaccaatccttttcataatggcatttactttcttacgccattcgttcggatttaacgttataatttgcgctaaattagcctgctgcttttcaacctggcttaaccgtttctcttgcagtaccatttgttcaatagattgttgcaagatctccagctgcgtttgtggctggtgaacagaataagttccgcttttccttatggctggcaatacttcgcttgttacccactttttaaaccgtttagcttcaggcttacgacttgttagtatcatttgatacaaacccgattcattaataaacatcatgggccgattttgacctgatacgaatatagttcgtatcagcttatcttcatggtctaaacgggcacatgctttactaacatcggtgtgttctaaaacctgacaaatgtcttttgctaagaaccagcattggttttcaatcattaaagtggtaatctgattttcttcatacgagaacacttcttgtaactgattcataggagcctccttcggtaattagtccacagtcaaacaaagtccctccggctcagcagccatctattgaaatagtggttgttgaaaatatccctgttttgccgctacgggattaatccataaaacttcttcccgtttcgcccccgcctcggcagtaaccgtcattacttccctatgccattcggccaagtgcgaatcgtaaagctcatgcgcatatccagacaagataacaggtcccgggtgctcgtttaacgccataagcagctggacatgatcgtcatgattcatttcacatttgtaatgtcgtttagttcttgtttccagcacatacggcgggtccgcataaatcaatacatcaggacgttgatagcgttctaacagcttcaaggctggctgattttcaatctgtgcctctttcagcctttttgccacccgttggattttgtcgggtagcgcgctccaatctcttgccacttttggaccgttggcggaaatgatgctccgccatcctgtcctatcgcttgtttttgctcctattgcttgccagcaccttattaaaaagcgcctggcgtcctccaactcttcgcctgtttgctcataactgccgtaatattcctgacgagataacggcgtgtattctatgagcctggaaagctcgtcggggcaatcgcgaatgattttaaatagatttaccacctgcccatccaggtcattgattgtttctaccgtcgacggctgtttattaaaaaacaccgctccggatccaaagaaaggttcgagatacgtttcatggtcagggaatttgctaattatccagctggccatactccacttactacctggataatgcaaaatacgcggaaaagcggtcattgaatagagcctcctccctcttagtacattggcgacgtcccgctatttacgtttaattccttatcactcaactgcgccctccaacaatttgtcgaccactgccagataatccaacggcactcgtccacgccttacttcataggcgtacactgcaaaatcatcgagtgaaatactcttacgtccgccacgctccatgtcagccacgtatttattaatcatcgacaatggtacgtagtatgtagttctagttgattgaaactcgattaggaagaaagccacgcctccctgttcttccgtacgctgcaaatgttttaactggtgaggctgtatccgtttaaggtcaaaacgttgaaggtttaaaattgttttagcttcaaatgcaatggcctttcctgcatacaccccgtcgtaatcaaccgtagactttttatcaaaaatggcaacaaaattctctgtgcctctctttattcctagccgtttgactattttcataggcgttggccgtttgttaattacggcaatatttttggcattgtattggctgttaaccagatcaatcaaatattcaaaggagctgccgatcgcttgtgaatgactcatagctccacctctttcacatatccatgcttagtccagcttacatggacgacactcccgtcctttttatttaggtaataacaagctgcaggttcgccagcttttcggtttgcatgccttccctttttttcggccaattctgtatggacaaatcgcttccctagactcgcataagtgtaatttctgattactcgcataccttaatccccctttttctctctagttgctaaaagggccaaggcagcaattacagcgactatgccacaacccaacataatccagccctctttataattaaaaatgaacatttaaaatcacctcaaaatggcaagtcgtcatctgaaatgtttatagtgccgtctgaaaacggatcatttgaataaccactgctatatccactgtcagcattggaactttgccccttacgggaaccttgtggctctaaaaactgcactgattccgccacaacctccgttacaaaaacccgcttaccttcgttattctcatagctccgcgtttgtacgcggccatctacaccagctaagctccctttttgaaggtaagtagatacgttctcagctggtttgcgccaaacaacacagttgatgaaatccgcttctcgttctccctgctgattcgtaaacgggcggttcactgcaagcgtgaaattggctacagctacaccgtttggggtatatcgcatctcaggatcgcgtgttaggcggcccacaagcacaacacggttaagcattttgcaccttctctttccggcactcccgttctttggcgtgcatccaggcaagggctgcctgttcatttggtaatagctcttctctgccttcaaaccttacaactaccgctcggggaagtcggtacataatgccgacttctccgttagatagctcacaatgactaacgccgtttttatctgtcgtgattttcatacaaccttcctccgttcttctagctcgtccatgaaattctgttcatccacttgggacgattgcggcttgtccaacatgtccaccaaatctaattgctgcccgtacttaaccttttgagcacaaacggggccatacccgcgtaacatgctttctttgccacgcaatggacgagagcaacgcttgcaatgtgtgtgcataacctcttggatcaatttgtacgcctccttttgtagctatcctcaagctgccaaattagctcggaataagtgattacatgcaacgatcgcccatcccaatattggtaaactccccgcgatgctagtagattaataatgtcagtgcggtgcttggacatcgctgttctaataaccgcccccatatgccgcctcgctttctgccctttgcttcttcctctcagccattaaacgtgcaattttagcttttgtctcttgcatagcactatcctggctattctttgttcctgtctgcctgtcttctgttagccaactaggttctggagccctacgctgattattgcgaggttggcggtttgcctgtttggacgttgcaatctgctgctgcaaggtatcgtagtatttggctaacttctccgggtttagcactctggtcatccaaaatggttcacttcttgcatacaggagtgccgcttgaattcttttaggctctttaccagcagcaatcatattagcaaatgaggcggcccagacattcatatccggttggctaaaatccggttgtacctttcgtatttcatttagcagaagcttagccaaatcataggcttcgctgtcttcattgattgcttggcttcgtggcgttagctggacaacgttatcccgcctagcggcttccctcgctaggtacacgtcataaagttctttcatgacaggcgctagatagccaagagaattaattttgacctgagaacccttacgttctttaattttctttatggacacatccaccagttgtttggcatggtctaactgcattgtgtcgagcaagtctgcagccacacagtagtctgcgcccactggcgtgagtcttcccacctgttgattaaaatgggccactaataaatctttttcatcgggttcctggccataaagcaatccgaaatcatcatcaaacgacgcaagctcctgaacgtcattagtggtattagtattaagtaattctttattattcttttctttcttgtttatagggagcaagtgtttccttgctgtttccgaagtgttaccaataacatgatttccgtttcgaatcccttgatctgtaaggctttctggtgtttccacagtgttacctctaacaggtgttttgcaatccgttaagtgttttgttcctttttcatcattactgttactagtaacagcttctatatcctgaatcccttgacttgactgggattttgctgtttctttagtgttaccagtaacacctctctcattttccactactggctcttcactttgataatttgaccagttcaaaatggtgataagtgtatactcatttccctttcttccgtgctcggttgtgatcatttggcgtttgaccatccactttagaatgtctcttattgtctttgctgtaggtacaattagttgttttttctcataataggcaacgccacttgcaatctttcgtgttgatgtaaggtgttgacctggtaagatcgttatgaatgtcccgtccttcaaaggaatcttaccttccttgtaattggccttatacttgagatacgtccaaacacggtggtaaagaggcgacatcatccatatgtcgctgtctaactctttacggtaatcctttatatagccttgcatggtatctcccctttaaagcactagttttcttttaaaatgcaaacagccacgcctttctcatggcgaatcaatataagttcgggatagttgctgcgaatataactttcggcatatttgtagtacgtgccagcagggtcactgctggccaatgcaatactcttatagatgtgtgggatcggaatacgatactccatcattttccctgccattatctacgaatgctcactagcagatcccagcattccctttaattcctcttcagtagagctattaaagagtgtaatcatgtcgctagcctgctgtttcgttaaacttttgagggtatctactttgtgaatgttagaggacaattgattgatctcctcttctgtcaatccctttctttttgctccggaattaatagccttgatttgcgcttccgtagcagctccgtttgaaccattgcttttcggttgattgctagaaggagaattactgttataactagagtccatatcctcgatgtcctgagtaaacaagcctgatgcacctgttgcttgcaatgttgctccaaccaatgctcttttaatagccatcttttggagcgtgttgacaagcatataagcatcttgattcctgtaacgcttttctttactgtttgcagagccttcacattcagataaaacaaattctacgcctgtctctgaagttcggtgtacagtaactttgtaagagaagtaaaagaaaccattctcccaatcttttacttgctctataacttgtaatctatggcctagtccataaaaacgaagtaagttttccgccccggacttgagcaaggttggtttaggtgttccaggaattttaccgtagtctgtacctggaacaagtacctttttggtaatatccttcaatgcgttgtatgcttctagcgcttgtgctggcgttacttgaacacgggcaatattagctgcagattcaataggttgtagttggttgtccattttttcctcctgtatttgcaaaatgtggtgttttcgcatatactagagttaccgactcttgtatatgcgattagaagccgaatcagcccgccagctggttcggttttttacgtttgtgcaattcattaaaaacttgaatcgcttcatctgacgtcattcctaagcgtctagcaacacggtgtacaaccgaaaatcccaatactgcaatgtggtggtacaaataaaattgctgatcctcgttcaaccacttatagcacccttcagaactccagtaccgtagcatcctaccgtcctcccccaggttttaatagttcaaatcatcgataatagatgaaagtacagctatttgctcttccacgttgccttgagaactatcttctgcaagcgaaatctgcacttcctttaaactgcgcttgacctcttctaactgtgccgccgtttgaagcaatccctgtgtgagagacatgaaaccaactcctttttaattttcaaagatccggtgccagctgcaccgcaggaactatgcctcgccttgggaaaggaggcttgtacacttatggggaagcgttagacatagtccctgcggcaaagccggaaaggcttgccgcccacaagaagtgatgataaaatgaagctagtcgattataggtttagagctgaagcatgaactgttgccgcagtttgtgcttcttttttgtttaccgggttgtttgactgttggaattggatacgccgcttggaaatttcgaaagccaagttgtacaatacttttttctgctgttgttgagcgtccataccataaacagccgttaggattaatgcttttctgcgaagagcaaaacaaattagtttcatttccattccgtctagctcgacattggaaccatgttgcttaaccttttcaagaaccattgggaaaaagatttgctccttgctttttactctgcattgccgttccaatgtttcctttatcacctgaatttcagcgctgttcataccattcaatgcttttgttttcataaagaagccgccctttccgaaaagaattgttcttttttaatttcttcataatgggacacactagtaaccaacactccgtcggccaaggcttcttgtgtccaactgcgccgaagtttttctcgatcaaggccccaatttaatgacaaactggtcaacagtgattcagttgcctgcttcatatcaaggatttcttcggcatgctcatatagttctttaccaaaacgttcagtcacattgtcacctggtcgaagctgaacggatatatccagcaatcccgcaattgcttcaatcgcttgtgtggcttgccggcgaaaatttataagctgagaaagcatgtcttcttgtaaaagtggattagttgccggcaaatccagcccccatatatgccgtacctttgcaagtgcagtatgatcgtttacaatttgacaccactgaatcgctagctctagtgggacttgtgctgtgccctcttcgattcgtgttaggcgggctacggtaatgcctaattcttcggccattctttgtttggtacgatgttcgggtttacttgcccgttctcgcgcaattcgaagtacatcccctatctgtgacgcatggtataatcgcgtctgactcaatgtgttcgccattttgttcgcctccgcttatgaagttttaataagtacaatggttttaaagcttgtacgattttttggcgacaagaccccatcgggaccttgcccaggaacttaggaactttttttgttcgcttcctcttcctgctgtttctttaatatcctaggtacagaggttttcatgaagaatcgataaaggttcatgaccgcctctttcgatggcttgcttgtatcgcgttcttccaaagtgatcgcctcctttcgattaggctatgtacttaggacggtggtactgcccttatataaatcaactcctcttaatgaagctaaaaaggaaattttcaacctatattcttcgtttcgtataatttattttcaaaaaaattttcgattggctcatcaagaactatggcaatttctttaagtaaatcagcactaatttttcttctacctaattcatagctgttataagtttgaacaggcattcctaaggaaatggctacgtatttttgagtcattccttttgattttcttatcactctaagattctggttaactttaatttgtctcacctcttttatatacgattcgaagaactaactatatattaattcttcaatttgtatatgtcnnnnnnnnnngattaagagacactccatttcaacatttggattcacaattgctgaggtagggaaaagatacataacaaattctatactggcttttagatcttctgctcagaagtaatgcacactgttttccttcacatgtcattggtataagtcatacaatcatgtctaacttcaaatgaggcaggaagatgcaattgtgtcatgtacctagaagaataagaggtggaaaaacaaacctgaatagtcctactgactcccacagtctggctttttgtttctgattggatctcagctatttcttgccctcatctttccagtttgagtgtcctcctgccagtcttccctgtttatctcagttggaatttttatgacctataaattcccaaatcactcatgccactcatatgacattggacatttccttatattgtagtttttgtacatacacnnnnnnnnnnggcatgtacattataaatacatacatcaaataaatactcagattaccataataaacgattttactagtagttaagtacttcagttcgaaataaaccctgtttctaatatttatttctcccctggaagtatcatccactttaaagaacgacttaaacattgggatgttttcttctttgtgccatgatttatcaatgtcgttaaccttcgctgaaagtacacaatatatttcaaacccttttaaagtcattctataagtgaaatctgtatcatctacatacaagaaaaagtttacatttggaagacccacctctggtataacttttttgtcaaataacaatcctccataagttgtatactgctttaagaccaagtttccatttaattcaatgtctttgttgtcaattcgtttatttataaatttatcaccaatatgaaactgaaaaaaagagttatttttaatttgcttcccctttatatcaccagcccaatcttcacgatacgcacataatataacgttatttttcgcaagacgtttcgatgcattcttaaattcatcaatcatggtgatttccggaacattatcgtcatctaataacaaaatttgaccttcgcttcctaactcatatacatgtttaatcccttggttgtaacctccagcggaccctttatttatattattagctataattattaaatcatcacgctgaccaaactctttttctatattatttttaatgtcatacgatgagttgttatctacaacgattatgtttgatacttcttcaaaatcataacaccttgtaataacctcttttaaaaaatgccacctatcaccgtaagttacaattacaacatctatacttctataagctatttgcatactaatatcctctttttaataatttgtcagtttgtttcatgaacatataactaataagtgcgataggaaaataaacataaataacgacatttaatattgatgctattggatagctagacaaaaatgtaattaacccaattaaaaatggatctgtatattttttgtttactaaaccattgagtcctttgaataaaatagaggnnnnnnnnnnatatagctttctgacttcctatgcggtcgtgcatacttcttgatacttgtcatgttcacttactcacgtatatatttcacctattttttggctgctctcagcaaggcactgcactggctggccgggcatgcttgtatatcaagctacagtgcaacgccctgctggcagcaaacaactagactcttaaatagaatataaggatatacaaaaagacgcccaattgaacacccttattgtggtagcttatagattaaatttaacacctaaaaagagagccatcccgtagggtgaccctctttttaggtgttaaccatgaataatttcatataattgctcaatctctttccttgcctcgtcattatatacaccttgcaaattttgtttgttaactaattgataagaatagtttgcactaaatatatctccatcaagtttgtaatcttgttggaaatagcctattccactggagcgtttaaatttacctaaagatacgaaaattatgctcttaacacctgctttcagtaataaattccttagagattcaaaagacgtaccattatttagataatcatctataacacatattgtttttccttttatttttgctttgtattcttttgacagattaatactttcaaaatgcctagtacaatataaacgcttttccagttcattaatatggtgacttttttctattggtttgtttcggatgaacattatatccttcttttgtttacccatcaagaacctagctctttcttttagcgtccatatatcatcattgtagtccttatttgaagaaggcataactgtccaaatatcaacttctttaaaaactggattatgtataagtgacgctaggaaatgtaattgtaataccgtaaaatactttttattgcctttttttaacagcgatctaaacccctcaaccatctctttctcagattggccaacattaaaagagttagcacttgttaatgagtaaacttttgcattttcacctacatttaattcataaaaccaacttttttgattattaattatttgaattacttttaaaagagatcttgtattagggatatggatcccataatatagtgctttatcacttttactatcacaccataacggatttaaaagcgcaatttttaagctggaggccaaatgcatatcttcagtattggcgcctacaactaaataatgttcatcttgattttctttaacctcatctcttacttgccatctaactttatactccacataatcaaatatttctctaatttcactaagtttacttaaatcatgtgacataaagataattttattaccttcttcatgtaaattcctaattaactcctctnnnnnnnnnngttgatagaagttggtttggcggccaagttctattataacgattggagattttttcatcactagacctctctagaagtttcgttttcacacgtgcagagcacgtggtttcaaacccatattaatgaagaaggggagtcgagatctgacttgatctcgactcccctttatttggatagatcggtatttcggtgaatgatggcgggcaagacccgccattttcttcagattgagggccaaccccagccaannnnnnnnnnggttaaagaaattaaatatgatgccaataatgtagatataaattataatcttgatccttcacaggatcagtctgttcttatactatttgattaataacaaatcaatcttaagggggtaggtgctatgtaatgaactgggaagacatcagaaaggaatacgaaacaacatccatcacgctaaaggcattagccgaaaagcatggtgtgaagctcggcacactcaaaagcagaaagagtcgagaaggatggagcagggatgcaaccaaacaaaaggatgcatccaaggttgcaaccccaaaaaaggatgcaaccgaaactataaaagaagaaaaaaaagtctttgttgaagccgagggattaacggacaaacaaaggcttttttgtatttattatatcaaaagctttaatgcgacaatggcagccattaaggcggggtattcgccggacacagcgcatgtgcaaggaagtcggctgttgaaaaatgttaaggtcgccgaggaaatacggaagcttaaaaacgagatgcaacaaggtatttttttggatgcaatggatgtcttgaataagtacatccaaattgcctttgctgatataaccgactatgccatattcggcaaaaaggaaatcgaagtaatgggaccgttcggaccaataaaggacgcggacgggaatctactaacaaaagacgttaactatgttgattttaaagaatcggatatggtggatggaacaatcgttacggaggttaagcaagggaaagatggtatttccataaagcttgcggacaagatgaaagccctggagaaattggagctatactttgacttgctgcccgacaaacataagcggcgcatggaagaagaaaagctcaaattggctcagctaaaggcaaacagtaccgagcaaggtaagcaagaaagtgaagttgcggccatgctcagggctatggtgaataaagatggaacttagccctaagcaaaaggaagtatgggatacttttgtccatgagaaacccaaaatcctactttgtagcggcgcaaaacgtgctggcaagacctttatactcatccttgcatttctcgctcacgtggcgaaatacgaaggaatgggattgtcgtttgttatagggggcgccacgcaagctagtatacggcggaacgttttggatgacctagaagtcatattaggtaaagagcttaaactagataaaacgaacgctatcagtgtgtttgggaataaagtgtactgctttgacggtgcaaatgcggatgcttggaagaaggcgcgggggtttacgtctgccggagcctttttgaacgaagcgactgcgctgcacgatatgtttgtcaaggaagtcatatcaaggtgctcgtacaagggtgctgttgtcatgatggacaccaaccctgagaaccccgctcatacggttaaaaaagattacattgacaaagacggccagcgcctatcgaatggtcgtttaaatattaaagctttccatttcactctttacgacaatgttttccttgacccagagtatgtggagtctattatcgcttccacaccttccggcatgtttacagatcgcgatattaatggactgtgggtagctcctgaaggagtcatttataaagacttcaaccgaaataagcatttcattagcaaaggtcagattccaacgtcgagaattgaaaaatatttctgcggcgtagactggggctatgaccatcctggtgcgattgttgtagttggaatggacgatgaagggcgcttgtacctagtcgaggaacatgccgaacgccatcaggaaatagactactgggtagacatagcgaaaggtatcaaagcgcgttatgggaatattaacttttactgcgactctgcacgccccgaacatgtcataaggttccggcgtgagggattacgggcgattaacgcggataaagcagtcatatcaggtattgaagaaattgggcgtctctttaaaagagatagcctttttgtcgtggacgaagcgaagcgcttcgaagaagaaatttatctatacgtttggaatgaaaaaacgggtgaaccgatcaaactttgggatgacgtgctggatgcattgcgttacgccatttatacgcatcttaagccgaaagcccggagaacagggtaggtgagtatatgaagtacgtcaaggagattcaggaacagggcataactgccgaactgatcgcacagatcatcgacgagaacaaagtggacagcgagcgcatgttaaagctataccaacgatataaagcctgtgaaaatgcggtgccgattttggaaaggcgagcggtgacgtttgatcacttcgacacaaaggctataaaacggcttgatgataaggtgaataatcggctgaacaatccctttgacgtggacattgtagacacaaaagtcggatatatgttcggtccgccgatcgtctatgattacgacgataaagcgcaaggtgcgaagaaagttaaagagcaaattgacattttcaacttgcgcaaccatgtcgaagatgcagacgcagagctgggaaaaatggcaacgatttgcggcaaggcggcgcgtttggcttacatcggtcctgacggaaatgagcgcattaaaaacattgacccatggcaggttattttcatcggcgatgatatacaagagcctgtttactcacttagatattacaaagatgcgcaaggggcgctacaagtcgaattttacgacaacgagaatatggccctatttaccgaagatgccaacgggcttaaacaagtccaagaaacgaaacacatgtttgatttcaacccgctgtatggggtcgcgaacaacaaagaaatgttaggcgacgcggaaagagtacagcagcttattgatgcttatgatcgtaccttatccgatgcatccaatgaaattgagcaataccgcctagcttatttagtgctaagaggggtgggcttggatgaagaaaccatcgctcaattaaagaaacacggggtttgggaactgtttgacaaagaatcagacgtttcctacctgacaaaggatattaacgatagcttgatcgaacatcatttagacaggttggaacgaaacatcattaagttggccaagtcagtggatttttctgatgaaacattcggaacttctctttctggtgtggcgatgaaatttaagcttatggcgttagaaaacaaatgcattatgatggagcgcaaattcacggctatgctgcgttatcagttcaaagtcattttttcggcgtggcgcaagcgaaaattagtccaagtgagcaaggatgactatttaaaagtatggtttgctttttcccgcaaccttccggttaacttgctggaagaagcgaatacacagcaggcgctaaaaggcgttgtgagcgagaaaacgcggttgtctttgttcagcgctattgacgacccggattttgagctagaagagctaagccgagaacaaaatgaatatatgcaagcttacgggagtgtaggtgacgaagtccatggagacacagaggacgattgatgaagcgctaaacaaggtgattgacgcaacagaaggcttcgttgtacggatattcggttcccttcgtcgacgcattttagatgcgctggcttcattgttccgcaagtacaaagagccaaacgtccctatactcgactcagtgcgcaaatacaaccgtctggattcctttataagcaaagtgtctggctggattgcggaagcgtataaaagcctattcaagcgcgcgaatgatgacattaagacggtttacgaagaaaatcatttgcgaagtggacatttgtttgagtttgctgcacaaaaaaggcttggctttaaaagacttaaagcaaaagacatccaaaaggcggtcaagaaccccatcccagagctggaaccggaaaaacaatacaacaaacaacgagatgaaacagcttaccaaattgctattgaggtgcgccaaggcttgcaagcgggggaagggtacgaagagattgcgaaacgcattgaaaaacgcacaggaatggctgaatacagagctaaacgaacggcgcggacggaagcgcatcgagtgcaaaaccaagcccgtttagatgcaggaatgcaagccagtaagcgcacgaaaatggtaaagatgtgggatgggacattagataggcgtacccgtccggcgcacagaaagctggacggaacgaaaatagctccagaaaagctatttgtatccactgctggcggtgtagggcctgcgccagggttaatgatgaatcctgccgatgattgcaactgtcgctgtgcagttgtttttctcgtaaatggcgagcttccgaagctcagacgcgcccgccctggcaaggatacggaagtcataccatatcagactttcgaagagtggaaggaggcattagccggatgaaaagcaaagctgaaatacttgtcgatgtgctagcgatcacaaaggacgaaccgagttattttgacgaagtttataaagagctaaaaagagaactggctttcggagaaacttcccgcccgttacctaagcgggaagatgaacgacgcttattacaagagcaaatccatatgttagaacaaaaagcggctcctaggccgtttaaataaaaaaattgacctgtcacacgtcgtaaaactgggcgcgtacagagtggacttttgtacacgctggacaaaaggaggataacaaatgccaacgttagaagaagtgaagcagtttcttgcagaaaacaaggaagaagatgatgtaaaagcgtatcttgaagaactttcggccgtatctgttgataaggtgaaagggtttcttgatacagatgaagggaaacgcttattgcagccacggctagatcaacactttacaaaagggttggaatcgtggaaaaagaacaatctgcaatcgttgatcgatgaagcggtaaaagcggcgaaccctgacgaaacgcccgaacaaaaacgaatccgcgagttagaagaaaagctggcagcaagtgaaaaagcggctgctcgcaaagaattagtcaacaaggctttaggaattgctgatgaaaagaagctgcctaaagggattgttgacttttttgttgcagacgacgaagaaacgactctttccaacttgagcaaattcgaggaagtatacaacgctgccattcaggagaaggtcgaagcggaattcaaaaaggcagggcgtgaagtagacagcggttccgctgctgctggcgacagctcgtacgggaagctattggctgagcaacaaacagcagatgaagatttagctgctgctcgcgatagctatttcaaataacaaagggggaaaacgaaatgaaatttacggaaacagtttatagcaacaaaaaagagattctcaaattcccagatcactacgtaaacattgcggttacggtgagtgaccaagacgcgatcacggtcgacggaaagaaaatcgttcctgccggaaccattttaggtggcggctttctcgcggatgacacggtcgaagcgacgagagctgaaactacggaagaaggggtatcgaatgcggagggcatcttgtttaacgatgtcgacgtaacgcatggcccagcaaaaggggcggcgcttattcacggtttcgtcgcaattgataagctaccagaagcaccaacagcagaagaagtagcagcattaaaacaaattacattcattaagtaacagaaaggatgacaataaatgccaactatttttgattatgtaaatgccaatgaaattgcggcttactatacaaaagcaccgtctaaccaaacaccttttttaggcgctacactctttccgccgcgtaagcaagtgggtcttgatctaagctggattaaaggggcaaacggactcccggttgctctaatgccttctgagttcgacgcgaaagctactctccgtgatcgcatcggattcaagaaagtagagacggagatgcctttcttccgcgaagcgatgcggattggagagaaagaccgtcaacagctgctgaactttgtctcgacaaataaccaaagcttgattcttccgtttgtcaatcgtatttacgatgacgcggccacactgattgcgggtgcgcaagttcagccggagcggatgcgtatgcaactgttgtcgaccggtcaaatcgcgattagcgcgaaccgagtaaactacgactacaactacggcatgcaaaaagagcacaaagaaacgctaactggcgaagctgcttggtctgatacggctaaatcaacgcctgtgcaagacattcagaaatggcaagaccaagttgaggaagatacaggcgtacgtcctacaaacgcgattctctcgcgtaaaacgctaggttacttgatggaaaacaaatcgattcgattggatttgaaccctatcggcggcgaaaacatcattatgactgaatccatgattcgtcaatatttgtcgaataagatcggtcttaatatcgctgtgtacaacaagaagtttaaggacgagacaggcgctgttcagcagttcttccctgataatgtgtttactctgattcctgacggcaacctaggtaacacgtattttggtacaacacctgaagaagccgatttgatgaacggaaacactgatgcacaagtacgaatcgttgatacaggtatcgctgtaacgacgattaaagaaccgcatcctgtcaatgtggagacgattgtatcaggcattatgcttccatcgtttgagcaattagacaacattttcattgctacagtggcataagagggggcgaaaacccctcttttttaggaggtaggaagatgagcgcgaaaaaaacagaggttgaatttttaacgaacgtcaaacacaacgacaaacgatattcggctggtgaaacggctaagtttacgaacgccgatttagaaatcttaaaggccgctggagttgttcgggaaaaatgacactcatcgaggaagtaaaagcgattatgcaacgcagtgctagcgacgaatacttaaatgtcatgataccgttgctcgaagattacgtgaaggatgagtgtaacaacacgtttcgtaagaatggaaaaaccgtctaccctggcggtgtgaaaatctttatcgccaaggcgtgtgaacataatttaaccgtttctggtgtctcttctaagcgactgggcaccgtttcttactcgtatgatttggactttcctgagtcactcaggaggcttctgaatccttataggcgggtgaggtttcatgctttttgacgacatgctcatacacaaagcagccattctggaactcgacatggttgacgacggagagggcggacaaatagaggagtgggttgattctggcaatcgtttgtcgtgcttatttgatacgccatccagtgcggaacagtatcgatatgccaaattaaacaaacagatcagccgcaatatgttttattacccaactgatctcgtcacgccgaagtcgcgcatacgggacgagaacacaaaggttgtctatgagcaagtgagcaagccagacgatcagggcgggcaaggagaaatgtaccagcttgcgctgctcgaggtggaaaatggggcttaaatatgggcagatgaagcttgcagctttcttcagccgcaagaagcgcgaaatattaagggaaatcaaccaggcgattgaagatactgcacaatacattcaagcccaagcgatgcttttggctcctgtcgacaaagggaacttaaaaaacagcattcaaatttactatttgcgcggtggtacggctgccgtcgtacaagtggaagccgattacggaatttatgtggagtatgggacaggcatatatgcagtaaaagggaacggacggagtacgccatggacgttttataaaggcggaaagttttacgccacacgaggacagcgagcgcaaccgtattggaatccagcgcttgatttaggccatgcctactttaaaagaagggtggcggcaatacgtatatgacaacaaaactagcggtgcgagccgtcaataaggcgattatacaagctttaaaaacaaacgatgaagtaaaggcgcttgtggatgatcgagtctatgcaagagtgtcggaaggaaccccattcccttatatccgcgttggggaatcaaatgtactgccttacgataccaaaacgagttttggcgaacaagtggcgtttgtggtgcatgcatggagcataaaaccgacgaacacagaagtgttcgctatgcttaatgccgtacaccgtgcattaacatccataaccactattcctgatttttcgctaagaagcgtcggccgtaccaattacgaggtatttgatgacatagacgggaaaagcgtacacggcgtttaccgtattcaatatatagtcaataacaaggagtgatttagatgagaagtggtagcgactcgtttttgattattcaaagcacttccgcagcgattggcgaccctggcgctgtacttggctttgaaacagaaatgacgtggggatttgaaaacgaaattctcgacgaaatgagtaaagagggacgtgtagtagggtacggagacacaagcgagagcgttgagtttacagcctaccacgatacccaagaccctgctcaaaatgctgttatgagcgcactagaaaataaagagcaagtaaaggtttggaaggttgataaacaaaaaaatgccaatggcaagcatagcgcgcgttttgcatatgcgattgtggaatcaatggaaatgacggctgcatcagatggattccaagaatatacaggctccttgcaggtgcttggcaactccaaaaaaggtgagctagacaaaattccggagaaaatcctgtccggtcttaactacgatttcgaagagcctggagaatacacaggagaaatcggcaaaaatcattcaaaaggagaaaatccacctccatcaaatcccggcgattcagaataagatttacacgtttaaatagttagagagggcataaccgccctcttttttattacccaacagaggagaaatgacaatggcgattgtactatctgttaacgaaaaggattacgaaggtaagatttcttttaaattcaattctctagcgaatgaaaaatacagtgaaacagacaaagaaggcaaccaggttgacgggtttaagaagatttatggcggtttacttgatggggatgccagctacctcattgctttttttgactgtgcgtttgctcatctaaaagatagaccatctttggaacaaatcgagacggcgctagataaatacgtggaggtcgacaagctagacgatgtttttgcatctgcctttgtcgcatttgaccagtcgggttttttcaagagacgcatcaagaacttttggaaagaatatggaatgctcgaaaaaatgggtggcgacgagaaagaacaaaaacagttcagcgcggcgtacaaactgcaagtcgagaaacgcgaagagtattacgggaaaagcaagaaaaaatagaccatctacaaatattcgaggattgtgccaggtatcttggtgtttatgaccaagacctgatattgtcctggtccccatccgaataccacgcttttattcgtggggcgaaacataaagaagtggaccaattagaagtattgagcattagcgctattttccagcgcgtagcaaacaacaaaaaagggagagtcaagccgcatcatctttacgatgcacaaaaaatgcataaacagattgatgcaagtaaagacggcggccaatctcataagaaagtcaatccattgccttttgaccctaatcggtttagggctgcaaaaaaagagctggacaaccatttcaacagaaaggggcggtaactatggcaacagaacgcatgcgggtggaagtggatgcgatcattcgttcctttcaacggaaaatgaaacaagtggaaatgacagcgaaaaaggctgtccgacgtgccgaaaagccaattgacgctgacacaagcaaggcactatccaaaatagctcgattggtggccgttactaaagcagcgttaaagcgcgaaaagaagatcattgacgctgacgtatcccgttatttgcgcaaaatgggcaccttgcttgcggtaaacaaagcaatggagcgatcgaacaaagggctgtggaacgcactttctcaggatgtagatgtgttccagcagcgcttgaatagacttgcaacgaacatccgctcgattgggacagttcttacaaacgtatttagtggaacgcttatttcgaacctatccatgcttgcgccgattattgccacccttaccggcgtggttgcgacactaggaaatgctcttggcgttgtcgctggttctgcgtttgcgctagttacagctatagggtttgctggtgctgcttttgtcgcatttgcagcagttgcagtccctgccattagtgctgtatttgaagaaggggccaagcttaccaaacaacagaaaaaggctaaaaaagcctttgacgactttaccaaaacttataaaaaaatggccaaggcactagaaaatcctgttcttgaaattttcaccaaggctatgaatacggcgacacgcgctttaaaaatggcagaaccattgtttgaatctgccacaaaggccgttgatcgtttaatggattctctgtcaaaatcgctcgaaacgcctcctatacagaagttttttgacacaatgaacaaagaggcagggccgttttttgagacggtcatgcaggcggttggatacgcattacaagggcttatgtctctcatggttgcatttgcacctttggcaaagtcaacagctaatggattccgcgacatgatgaaaaggttcagtgaatgggcttacggcttacagtcttctaccgcgttccagaactttgtcgactatgtaaatacgaatatgccaaaagtaagaagcatttttggcaatgctattttaggaatcattgacttgtttgcgtcattcagtggccaatcagaagattttttaacagctactgataacgccatgaaaaggttccgggagtttgcccgaaccctcgatgaaaataaacaattccagcagtttttgcagtatatcaatgaaaatgcaccgaaagtcatggaccttataggcaatctgaccatgtttattgttaatctaggtattgggctagccccgcttggttccattcttctcgacttgatgaatggttttttgtcgtgggcgaatagcttaatggaaagccatcggtgggtaggtgtactagcgtcaggagcatcgcttttagtgggcggatttatgattttggcgccgattatcatttttattcaaacagtgtttggtggtttggttcaaacgctgatgaaccttgcaataaatgggtttgagtttttgaagaaacatgtcactaagctattgaatccggtcaatttgttgcgtaacggtattagttttctaggaacggtttttggcgcgctaagtgcccccatcctgttcgtgataggtgttgtgagcttattaattgccacatttgttcgtatgtggaacgaaaacgaaaatttgcgtaacggtgtgatgaccgcgtgggaaaccattaaaacgacaatttccgaagtcgtttctactgtcactgaatttgttatggaaatttgggggcagatggttgcttggtggaacgaaaataacgaacagatactagccaccgctcaacgtgtttgggacttcgtttatggagtcatttctgaatccatttatggggcttgggacattattgtctcggtttatgagctgttaaaaccgtacatcgaatccgtttgggaaaacataaagactgtaatcgaagccgcttggaatatcattaaatctgttgtccaaaacggaatggaaattattttcggcatcatcgaatttacgatggccgtcattaatggagattggtccgctgcatgggatgcaatcaaagacatcgtcggcaatgttctggaaatcatctgggatattgttaaaaacattttcacagcgatttgggagattatcaaagaaaccgccagtggcatgtgggataccatcagggaatactgggataagttttggcaaaaaatcagcgaagttgcttccaagatcagggattgggttgttgaaaagttcgaagaacaaaaagaacgactggatagtatcttgcctatgattaaggcaattattagccaaaaatgggaagaagctaagcaagcagtgaaagaaaagctgcaacagatggtagcgaatcttatcgctaagttctttgaaatgcgggataacgcaaaggctaaagccgccgaacttgtttcaaacgttattcaaaagttcaacgaaatgaaagaaaatgcaaaatcgaagattaaggaaatggtcacaaatgccattgacaaattcattgagtttaaagacgaagctataaaaaaggcaggcgaagcgaaagacgaggtcgtccgcattgtctctgaatttccgggtaaagtacgcgaattcataagcgatatggtcagcgccggcggcgatttgattaatggcctaatcgatggcgcagtaggaatggctagtagtgcgataaacaccgtatcagaaatagccggggacatggtagatgcagctctaaaattcttcaagatcaaatcaccttctcgtgtattccgtgaaatcggtatgtttgtttccgagggcttggcggttggtgtagctaaaaacgctgtgcttgccgttaaacaagtttcggatatggcacgagggatgaccgatgcattttctcctgatttggctatcgcagatatgcgtgcctctgccgttttagacacgtccatttcgagcggtgacatgcgaggtattaaacaaggtatatcggccgaagtgtccgatttcgaaatgccggaagctcaaattgttgtacacaatgaatttatcggtggcgagctcgtaacgtatgtcaatcaacaaaacgctcggaacacccgcaaaaatagatggtaaggagggagaaggatggatgcgataatagagcgccaagatggacaaagagtccacttggctgatctgggaataatcgtccttgatattcgcatccccgctgccaccatttcatcgtacggaactaacgttccgggcagggctggcaaagtggataaagggtcggattatactgggagaacacttgaaatcgatttattgaaaatgggccaagacctaatggatttcccgtttatacgcaatcaaatccactattatttagggggaaaagattgggtgtggctatatgaagggcgatcacttggtatgtgctatgagtttgagcagccagggcaggagagcgtaaacccgttcgaggtcgacaatgactatatttacgggatgcgctacaagatacggtcacaaggtggatttaacgttgaccaaatcactaaaaatgggcgggcgactgtaacattcgacttaattgagctgccgtttgctgagagtacagctaccaccttacaccccttcatccttgacacaaaggacagcgtcgaaacacaggcgatttggacagtcgaccgcgcccaattgtttgatgaaatacccgtttatacggtcaaagggtctggcgaattcaggatttacaacggtggaactgaagaagtcgaccctgatgaagggatgtatctggtcatcacgcataaaggggctagtgatggacttaccatagataacctcaccaacggcagtcgatttaaataccttgattcgacaaaaacggcggattatctcgttgttaacgggacggatgtcaccaaaaacaacgtaaacgttgtgaggcgaacagaaccatccttacttacgctttcggaagggtggaaccgcattaaaatcagcaattcatcaggcggagaaacttcttttgatttccgttggtatttcaggtaagggggcactgaaatgacgaaagttgcccggtttatagatttagagggccgtgcttataatacgaatggaatcatcagcataaaaaaagaagaagctttgaacgaagcgattatgctgcaagttgaccttgagcggacaaaggaaaatgaccgttattttgacaacattagttactattggtcatttgagtttgacggcaaagtatataagattacagccatttatgacggggtcaaaggtgagacttatgaccgcagttttgacatgattcacgaatctatggacgatctgagaagccatttcgtggatgcggaagtaaacaacactcgtagcttctcgcagatcatggacatcatctttaaagattccggctatacttggcgacaagttagcgggtcttttgcaaacttagattttgagaactggggtatggaccaggcgactaatctaatcgacaatgttcaaggtcgatggggctttgaatacgagattgatgatgtggcaagggaagttgttttccgtgacaaagtcggcaccaatgcgaactatcgtttgcgatacaaacttaatttactcagtttagaccgagaaattgacgcaatcgattttaagacgcatggaattgcttacgggaatgaaggaaaaccacgagtggagtacacttcgccgcttgcggaaaagtacaagctgcgcacaggtggttaccgctctatggggtttacggataaccgatttaggcatgctgattcattgtataacttgcttaaaaaacgtgttgattccacattgcgattggcgctgacagtcaagcttataaacctgcaaagggctggctattcaaaattcgtgcctagggttggcgattatatccttttgtatgacccgcgcctaaacatcgatttagatgtgcggattgtaaaaattacaagtgaatacaacaagaatttggaagaaatcaatacagacgttcaactttccaacttctcgactgttgacgaagtgcaaaaggcacaagaaagggcgcttaatgacatacaaggcgtgtttgaaggcgctaaaagtttgcctaacaccgctatgtcaagagcgacacaacaagctgtgcgcgacgtacaaaatacccaaaccgaggttaaattcggtgaaggcatcaatggtatgcagttgatcgataaggataaccccaactacgttgtacaactgactagcaaaggaattttgctatcagaaaatgccctagaaacagcagtgacagccataaccggtcgcggcattatagcagaggccatactagccgggactatcacccaagcgggcttaaggtctatcacgataggcaacggctacattactagttactatgacaaacggccgacaatcggatttggtcaatgggccattgatttttacaatatggacggcagtacaagtgctcagttttacccaaaccaaatggtcggacacgataacacaaaaggtacttccataacagttgagacggatagcttttatagcgtcaactataactattttgccgatagcagttctcctttctttcctgtgtacattacatcgatgcaaatgggctatacaactgtagcaggtgcaccaaaatcacaagcggctgaaactcgtttgaatcttattgctaatgccggaatgattggcgaccacaaactttatggttcgcgggataccgatcaggcggcaatctcattggttaagagccgtacagcaaactatgttgacctgtattttggtggatatacgaaccgagataacagctatttgacgttttatcacaatgcaagcgaaacaactgtatcgcctgttatgcgcatatacaaagatgctgttcgctcgtatgttacgcactattttgctggtctcactggccgaatagaaccatacagtaacggaatgtcgttgctatatggggatggtaatcagcaattagagattcgcatggtgggagatcgtatacagttctttacccgtggacagttgaaattcactattccggacgacgtggacacgattttcgatgccttaaataacagataaaggggaagcgttatgtttaagcggtttgcggaggaaatgaaacctattcagcaaccaaaagaattcgaaaaaccgattgaagagccaaaaagcataaaaatatcgatggcggtgaaggaagatggagaaacaaccaaaacagcaacaaattaaagcggatgaaaagatgctaattgcccgtatggcgcaagaaataggggaattaagatcacaaaacatagaattgagttgcattattgaccaattggtagctaagttgaacgaacaaaaatagggggagcttcgacttatgaaaacattaccaatgaagcctttgcgtctgcatccagacaaaatgagcctgccacaaataagagcaacgaacaattacaattacaaactaatcaattcacatttcgggttgttgaatgagaagtttagtcatgcgatcgacgaagtatcagaaagagcgtttgataaagtagtagaccgcgcaaaaatcgattggctgtcgcctgtcgatacatttgacgacttggctaagaattacccggatgctaaagaaggccagacggtcatggtacgagacaccggtaaaatctaccgcatgactgatggcgtttggagagaaatacaggacattgaccctacggcaattaacgaggtggatgcgcgccttactgaaaatataagtgaagtagcggctggagtggcgtcttggattgacgaaaacggtaccatgagaccgccgaagtttcagagaaagctatttgaaccgtttgtgggatggggagatacagagcttttcccttccgccgcaaccgcgccgcaaggtctggctcaagtaaccattaacggacaaacgaaaatttttatgttatcaagagtagcaggctctgcatggagcgtggatgaacggtcaagaattgttgaatttaacttaagcgaggatggcgaagaagttcaacctgtcgcctactcacagccccttaagttgggccatcaaggtttgtcggctttagtcgaaaatggtcgagtgtatctgttttcgggcgcaaacacagggggcgggctaaactcccaaaagggatactccaaaattgagtggcggggttcggagacgagcgataaagacgtggtaacgtatcgtctgtttggagatgcaggaagtggccatttgttgcaagatcactaccgcagtactccctgtgtatcgagtgacgggcaacttgtcattttgtccacacaagggacatgggaggggaatgtccgttattgcgtcgtttataaccgtatggagatagaagatgcggatattcccgccgaagtcatgccgattaacgtgtttaaaacacccacgccgactagtgacaatacccatattgtgcaggacgtggcaagtgatgggaagtatctgtttatactacgtggcggtgtgcatccgctcggtgcaaacgttatacaaatatttgaggttacaggctatgaagtaggttcgtttaatgctgatctatctttaggcgactatagcgaggctgagttgttagggggcgcatctgatctcgggatacctgtgcaacatgagccagaaggaatcgatgtcaaagatggccagttgttggttttgtcaacagacgtctggcgccagaactgtccgattgtatcgcatgaaggtaaaaattacgcaatgattgctggtcaagaattacaagggggcaggcagccgaacgcaagcacagactggattgttacaaataaatcagcaacacaaggagaatggtcttcgtcaacggtttataaacccggagagtatagtaaacgtgggaaggtagtgcattctctcgggcatcgtttaactgtccaggccatgtccgcaaaaggaatatctagcgctgtgcaaccacgtcaatcaacagcctcagtacacataccaggcagtgcggttgatgtaagtataccttacggagatgcctttcagatggctcaatattccgagcttggacaattttttcggtatatgctaactatcaacaacatgaatagctttcgtttctatgattttcgcgacggggcggataattcaaaccactcgtctataacagtagttaggcacagcggtcgtgtgtacacggaaattcgcgcgaaaagtactcactttgagggtgggggaattaacctttacggcagtgatgatagcaccggtgttgcggggagtacgcttatttactcgcacaacaaagaaaacaatgagtcgcataatgtaaggctacaggcaacaggagcgtttcggccggggaaagatgggactcaaaatttaggaacagccagttatagatggaacaacatctatgggtctagcgacacgattaatacatctgaccgcaggctcaaacaggacataaaaccgataccaaacgaggttttagacgcttgggcagatgtagaatttgttcaatatcggttcaaggaggcggtgcttgaaaaaggagctgacgctagaatacatgtgggactcatcgctcagaatatttacgaagtatttgaggctcacagtttaaacgcattcgattatggccttattggctacgacgagtggccggcacaggaggaagtccaagacgagtccgggaatgttgttcaggagtcaaggaaagctggcagcatttggtcagttcggtttgatgaatgtcaattcttagagctagctttgcaacgaagagaaatggaaagactcaaagcccagctagctagcttgcaaaagtaaaaaaaggcgtcccaacgggcgtcttttatataaggagtgaacaaaaaatgggatttgtttgacgtggtttaaaaaaggagacgtgaataaaggctcttgtgaaggatttcccccatttttgtcgaattaagtaattataaaaagggggaattgatattctttattcggaatttaaagattcagtaaaaaaatcactagatgaatactttaataaaattagcgaaattaagtttgaattagaaggaaaaggtagattgatgtttccgaatattcttctattcactaaaacagaagagcnnnnnnnnnnccccccccccccccccccccccccccccccccccccccccccccccccccccccccccccccccccccccccccccccccccccccccccccccccccccccccccccccccccccccccccccccccnnnnnnnnnngccccttgacgggcttgctagccgtcttagtttcaaacggaaggggtcggggccccaccgtttgaaacttagtcggcttgggacgttttacgattcggaaggcaaaatgggaaaatgtcaatctaaaaagcagccggatggctgctatccttgcttttgacctttcgtttttcggctcgttcggtacggccgcctcggcggcaaatgaatcaggaacctacggcctgttagcgaagtatgagcttacaggccgtggttatcgagtcatttagtgccgaagcgacacgtacagaatgacggaaagcgaagtatgctttccgatcagtctgtagtgctgccgcccaaatgggcttgttggtttggtttcnnnnnnnnnntaggagtttttacgatgaacgctaaggaattaattcaattaaataataagaagcgaaaagagctgaccaaggaaaatgaagagtactatgataatatgcttgtttacattcgaacgagtgtgtcagtttctgaacagcaggcggaagagttattgatggagcttttagatcaccttattgtcgcacaagcggaagggaggcgtgctgaagaggtgtttggagagaatcttaggacgtactgtgatgaaatgattaaacagttacctaaagaacccttaaaaagcactgctttttttataagctttttattgttacagctagcaagcttgatggctatagtaagcgggataggaaatatcgttgtacattatgttaaggatagcagccagactgtttatatnnnnnnnnnntttagattgacattttcccattttgccttccgaatcgtaaaacgtcccaagccgactaagtttcaaacggtggggccccgaccccttccgtttgaaactaagacggctagcaagcccgtcaaggggccaaaaactttttgctactataaaaacaccgaggtagcaaaaactttttgacggagacccttgacggtcttgctatgggcgtttttcgttctccatgccaaagggaaaaaataatcccctttggggacatctttcgcttcgtaaggcaaaaagcgaaaaaacaaaattcaaaggaggaaattcatatgaatcagtttcagaaaggtgacgaagtacaggtattaattgatattacatccggttggcatattaaaaaaggcacaatagggttagtcattggaaatgaactctcttatgtggaggttgattttcattataaagaaacggcatctcgattgtatgaggatgacagcctgtcttactgggatatagcttgtggccctattgttcacgaaaaaaacttgaaactcgtaagggaaaaatcataaattactgttgtcattatagtgtctaagtggtataatataattaaagaaagggagtggaaaaaggtaacggatcaccgacaagtccagtctgtcggattgtaacatgtaaaaacataagcacaaggagagttggaaaatggagaaaatatttgaggttgtaagactgacacaggaaataagagacttggaagctccctacgtcaaattcactttaaatggaccagagcaagttgccaagatggcgacacactttattggggacgaagaccgagaagtattgctggtcatgcttctcaatattaaaaataaagtaatagggctacatcgctgccatgttggtagcttaaattcctctgtggttcatccaagggaagttttcaaagtcgctatcatgtctaacgcggcatctattatcgttagtcataatcatccttcgggagatacagagcctagtgcacaagacgtagaagtaactaagagactgcgtgaagcaggtttgattttaggcatcgaactgcttgatcacatcattgttacttattcaggcgattacgtgagcctaagggagataggctacatttaattaaagaagggggtacccccttctttaataagggaggagaaatcatgaatctgaaggagaaaattgctacttgtccgtattgcggaacagaggtggtcgagcaacaggcagattactattgttctttttgtgagatgtcgataccttcgttatcgattcaatacaatcataatagaccggaagtttttactgattttgatttgtgtgaagacgagtttttactcgatctttacattaataaaaatacgcaagaattcttacagctttcgacttatgagctgttgtatgtgttaagacacatacgagcacaacgtagcgaaatttacaaaagtctccacacatttcggaatgcacaaggaacagacgaatacactgatgaagctggtaaactctatgaagagtctaccaagagaatgtttgtggtagaaaatatccttcgtcaaagacttgggtatgttccgccccgtgtcacagaacattttttatctaagtataaagaaatgattttgagagacaaagggaatgcgatggtgataagaaaaaaaagtgtcttcgatcaacaaatggggtataataataagtaaatactcttgtgcttgagtattacatgttacgctccggtctgatccaccggagttttttcaaaaaaatattttagtgtctaggtggttaataaaattgaatggaggatataaattatggaatttgattttttgaacatggaacatcgtttaggatttcaggatattcgctcagacatggagccttattatcggaataataaagagtttttggccgtgatctatattatgactggccatgaagagttacagcttaaaatcagcccctattttaaatcaggagagtttcattcaggggaaatgtttgaggagcaagatttcagcgggggcatgatggtcatggccaagcttgctgtccatctatttaacaacaatgtaaccgtttctccgcttgactttatttctttggatgatgaattatttactcttgcgatcaacgcaataaagttacgtcgcgatggtattaataatagctacaacgtcaaaggtgggcaaagctacatctaggagtgaatcaatgtcaatggataaaggcatgaaacgcgtttctttttccttgttttcggggcaaggagaagcttataaaagccttgtcgatccgtctatgcagtcacgtatcttacggtactacattctcaatgagtaccagttacctaaggatttgaagataataaatcaaggcgagaagaaggatctcgaaacacaaccttttcgctttgatgaatacacggatcgtagactaaatgtgttggtaaaagaggttcggcatgctggtcataaagcaaaccgttcttccctaatgcgtcacgttatgacgcaattaatcaacaaattagaaagggaagaaggaatggcgaaggatcgggaaataaaacattctagtttctattttgaaaaaggaactagagaagtgttagatggttttgttccgttccgcgatcggaacgcggttatcgaacggtttatactagaagaatttcgcccaaaggtggataatgctctttttgaaaaaccggtagaaccagaatctatgcgtattagcatgtccgttcaggcttttgacaaactggacgagtatgctgagaaatataaagaaaaaggcataaaagtcaagagaacggctttaatgcgccaagttgttgaacaactaataggcaagctttcaaagacagatgggcggaaattaattgccgaggcaaagcttcagcatgccctaagcgaatacgcggagacgtttgggcatgacaaattaaaggagcggatagaccaatatggaaaagaggaataaacatgagaagtatatttccgcttgttatgagtcttcttgtatgcgtttgtctacaggctttttcgtatccgttgagcccgtttgctttgtacatgttaagtaccattccttgcggatggtcaatcataaacagtcttaaaggaccgatgacagaaacggattacatcatacgtgagattcgtatgatccgagtagatgtattagtagaactcgcgatttttttaatgagaaaatacgtgaaattcctagtctctttcgttattggatggattgtagctccatgtcttttaatcaaggcaatcagagatattgtttatgcagtacgtgtgcgaaaaaagaaaatcaggacagagaggggatagtatgcaagcgataattgcggaaaaatcaagtcaagcccaagcgttagcggccccatttaaacatagtaaaaaggagggacatattgaaatacaaccatgtgagacgttccccaaaggggcgctgttgacttggtgtgcgggccatttatttgaaatagtggaaccacatgaaatggatgaatcattgaaaaagtggaccctggataagttgccaatggttcctggcgacttcaagtataaagtaattccagaaaaatcaaagaggtttaaagccgtcaaggaagttttgcaaaatccaaaagtaacaggaatcatagcagctggcgatccagcgcgtgaaggcgagctgattgttcaacttgtggtaaaaatgtcaggtgtcaaaaagccaatgaagcgcctatggacgcaaagcttaacacctaagtcagtaaaaaaagcttttgacaacttgttagatattaaagcaacccagccactttattttgaagccatggcccggagttatgcagattggcttataggaatgaatgcaagccgtgtgtatacattgttaatccaagacagaggtgtagagcgttctgtttattcttgtggtcgtgtgcaaacacctactctcgctatggtagtgcaaagagagcgagaaatagaatcattcgtgcctgaaactttttatgaagtgtttgctctttatgatgcaggaggcaaacagtttgaaggtaagtacgctatggaaaatggaaatgggttacgttttgaagcaaaggaaaaagcgcgagaggtacaaaaagaatgcctgggtaaaacagcaacgatcgcagaagtgaatgtggaaaagaaaaaggtgcaaccgcctcaatttcacagtttaagctcgttacaggctttaatgaataaacgctataagttttctccgaagaagacacttgaattgctgcaaaccttatatgagaagtcgtatgtcagctatcctcgaaccgatagtcaatacgtaactgaaggagaagccgaggcttttcccgagattttaaagaatcttaaatcgttagaacaatatacgactcttattgaaggtatagagcggaatgttgtgaatgataaacgctatgttaatactgaaagggtatctgatcattatgctgttatcccaacagaaaaagtaccttccctcgacgatctgagcgaagatgagaagaaagtatatgatgttatttgtcgatccttaattgctgcacattattttccggctgagttttctcacacgacgattcacacgaaggtggaggatcatcttttcgtcacgaaagggaagcagatgctctttgaaggttggcgaaaagttatgtttgatgatgaaaatgaagatgaggattcgcttcttccagacgtgcagcaaggacaaagctgtaaaactgaggaggtttctatcaaggaaggaaaaactagtccagcaaaacgttatacggagggcgagctgatcacagcaatgaagaatgcaggatcggggttaaatgataaagagatcggaaaggtcttgaggtcagtatcaggacttggcgaagaaagtactcgatccaatattattgaacgtttgaagtccctaggttacatgcaaattgtcaaaaaccgagttattccaactcagaaagcttttatactaattgatgcagttaaagatacggttctggcttcgccggaactgactggaagatgggaacagcggctaaaagaaatcggcgaagggaaagcttctgctaaaaatttcatcgatcaatcgaagaagcttgctgaaaaaattgtcaatgacgctaaaggccatgcttcttcgtgggattttaatgtttatatcgagaagatggccaacgaaaaatttcttggccaatgtccgaaatgtggggaaggcgtaacagacaaaggtaaattttatggttgttctgcttttaaatctaagaattgtgattttacattgaataagaaactacttggtaagacgctaagtgaaacaaacatgagaaaactgcttgagaaaggaaaaacaaatcttataaaaggattgaaagggaaaaatgccaaggaatttgatgcgtatgttgtatggaaggaaaaagaggcaggcagcattgggtttgattttaaaaaaaacaagaaagttgtgaaatcctagtatggccactcggaattattcataagggagacggggggcaaccaacgtgatataataaaatggcaatagaatacggcttcctcaagtggcggtcggctcaccccatgttatacccgaagggggtgatgccttatgacagtttttcaagcactttctttgatgatctcttttgggattctgattgttgctttactgtcgttccaccaaaaaaaatagaccgcccttgagcagctcactcaaacctgggtggtctatccgctgaagccgatcccctttggggaaccgtctattgcatgaccgttagtgttccagcactagcggtctttttaatttatgcagactttctatatttattataaccgattttaggcaaaatgaaaatctccttatttcgaaaatagacgtgcaataaaacttttcttcttggagtttccttgttcctgtttgacagcagcggtttcaatccgtgctttttgcaattctctaatggactcaagcagttgattgtcccgcctggccaaagaagtatcgatataatgttgttgttgttcaagcttttgaaccaatgcctgattaaattctttttgaagctttatgtgctcatttattgcttttaattcaataagaatagcatcttcaggcggtttttcaggttttaaagggtcatccccggtggcaaggtagtattctatttgtttaagcgagtagccttgatcacggctcaattgtttaattaataatagtcgctctacagcttcttcgttgaaataatggtagccgttttctccttgggttgtagggatatggccctttaatattcgcaaccagtttcgtatgacatatggagtctctccgatgtggtttgccgcttcttttacggttagtgacagatcgctttgcttttccttgatgttttcatgatctagcttttcatttctgctcatgtttacacctacctttcattcttatgttttgactaatgtttttcctggttgctcatgtcaatttacctttatcagctaagtttcactaattaaacaggttgtcacacaacttaatgacttatgttatcaattcggtgcatttggtatgcgatcctttgactaatcgtgtctaattctgcttaagcaataaaaaaacccaccttaaggtgggttgactttatagttaagcaaaagggtcttccaagtcttcaatgtcggaccaagcttttgtttgcttgtcctctttaactggttcagactgtccttctttggtttctgtttcttttaggactttgttgctttcttcgagaacagggagatcagtggccgaaagatcaaaattgatctttcttggcatgacctccgctacatcgacgtatccagtttttgaataaagctgttgcacagcatatagaaagaagtttgacaagtcagattgcttgttgatccactcgatgaattcaggggttaagtctcgacttagatagatattgattctgtccccttgtttatattcttttttacgacgcgccatctgttacaacacctagttctttttctttttgctgctggtaacgtggagagcaagtatagaccagcaagccccttgcgtttacatacattggattgttcaggaatgttgcgttcgtcaaacgtcccttcgattttagaatctgctggagatattcttttaagatggcggctccacccccataaataaatacataaggatcgtccttgaggtcatcaatcttgttgatgattgagctactgatttgttgtgctaactgtaaaagccctgtctttgataggtcaacaagatcattgtgacgtggatgctctgtatcaaagtagatttcattaaattcagccatgctgtcaatagactttcttgggttgtttcggttccagcgcttaattatctcattaattgttgcttttacgccaaaattcaagccttcagaaagcttagggttgtatttaacgccttcagttacgacgatttccgttgtcccagcaccaatatcaaaatgtaaaagtgttttgttggcaaaatccattttcatgatttggtcgccaacctcaacctttctttcagaaagctttccattttcgtcgaagactaccccccatgcagctgcagcaccctccggcagacatttgcaatattctattatgattgttactgttacatttcttcctgaaggatgatggaaaataacttcgtgtgttccggtgaagcgtgcagcattagcttgtgcgcttttttgtgtaattgtgcttaccggaagtgctacagacaaatcatatgtaacttcgatgttgtcctttgaataatcctttttcatagcgtctacagctaacccagcaagtgttacaagtacaggaatttcatcttttgacttatcggatttcttttcgagttcgataccttgtaaattatcattcaagactttttctccaataacatagcgttggccattaaatgaaagtgcctttgaattgatagtgacatcaatattatgaagaagatcctctgctggaatgtcttccatatccatgagttctgttgtttctcccatataaagtgaataaacagttgggattagcacaggttcagaatctttcacccataatttcattccgttgttcccagcatccgcgccagcttttaatgtcataaaatcatctccttattggatagaatttgttttcttgcacctattatacacaataaataatacataagcaatactttttgcgcattttgtgcgcacaaaaatataaaaaaactagcattttatgtggacaaagtgtttcttttatgtgtattatatacatactatgtgcgcacaaaaagcaataaaaaataggatcaacttaaaaaaagctgatcggtaagaatggacaaagcctggtgatttatgtattatgtagataattcaaattttactaggattatagaaatacatatttttacatataacagacagaaagaaagagccgtgctgacaacaccgctctttcaaaacaagctagccccggcgaccaacctcacgctagctttgatagactaatcatgatgctgacaacatcatgatctgatcacataatatacatgtacccttatactacatgatatatacgtggtttgcaatatttttgttgggtaaatcgttcggtaattcctaacaaatttctgcattcttctatcaaggcaaattgtgagatgtgagaccgctacaggcaatagcttgtggcggtctttttgtcttgagaggagaaatacatatgaacgcttttaagcaaatttttaaggaccagcttacagaaaaggctaagaagaaaagtgaaaaagaacagaacggctataacagccatttaggatgggttttcatatgcaatgattttggccgtccaaagtctgttcgtacctttaaatctttgtttgctgcttcaaaagcttatacatattacacgcctaacacattttatcgcaacgatcagcgtcatgcagggtcgttacgttggttaaatgcgatggttatagatatcgatgcaaaatatggccaaaaccgtggaataacatttccagatgtgatggattatatttcgtcagctgggcttcctgcgccttctctggtcgtttcaacgccttcaggggggtttcatgtctattggtattttcatagtccaaaacgcgcttttccaaaggtaatagaactttataatcgtgttcaagtttctattgcagaggctataaatgccgataagcaagcagtgggcgctgaacgttggtttcgtatgcctacaaccgacaatacgatctatcaaagcgacagaagggtttcttttgatgatttatgcgattggctatcaatctatcaagaacagcgttcagaagaaagaaaagctgtttgcgtggattctactggcttattgcagcattcggccgtaaaaagacttttagagggggtttcagaaggtcaaagggacaatacttgttatacccttgctttggcgttcaaagcttcaggttacagtgaaaaagaagctgaagagcgtttaaaagagtggaaccagcttaatgatccgcctatgcgccaattagaaatcaaacgaaaggtaaaaagtgcatacaaaaagggttcaccagctggcccatcagcgtattggattcgtctgctttccggtatggcatttacttatcagacatgggaagaggcgaagccaagagaggaacgcatatacagtcatcaagatgaatgggaaaatgatgttattgctcatttgaaatcccagggcggtgttatctcagggtcgcaacggaagattgctcaagcaatcaaatcatctttagatagggataaatcaataccctattcgacgttcaaaaagattgttgagcgtctagttcaaattggaatcattataaaaaaagtcgaaggaaaaggtcgtggagccgtgacgattttaactctggccaaacgttctaaagttgttccgatcgggcgaaaaaagagcacgtttggccataaaaaaaatgagttcaattcaaatacatttatagatcaggtggtgggtggggatccctttatttctagcgctaggtccttacagggcatttggtcttcttgctctccaagctttttagcaggttatttacgaggcagtccttaattttatatgggggtcgtacgttcgattttacgaggcggttttctgagaaaaattaggacgatattaccttgattatttattctggtgtgctatcattgtgaaaacagatgtaaaaacagatgtctaaataatactattcaccacctttacacctaatttattggttgtgtgcttaaaagcggggccggtcctgccaaatggtcacggctctccatacttacgatccgtgaccatttggcaggaccttagatatataatccacttacccgataaaatgttattgtgtggtaggtgggggtggtgaatagtaagtaagtgagaagagagtaagtgaggtagttaggtaaggttataggtaagtattggtaagttagtaagtaagttcaagagagtagagagtagttcaagggagagggaggaggtagttaggggagtgagagagagtaagtaagttcgagggagtaagtgagtaagttcaagagaataagttcaagtgataaaagaataagttcaagtgcgtaagagcagttgaagggagagggaggagtttgaggaagtttaggatagtttatattgggttaagtggtaattttgtaattgagaatgtgtttggttagttgagaatagatatggaggtgtttagttggaatgaggtatcatgttttgccgtttttgattccgagagatggggttagatatgagttaaagacaacgatggatagtaagattttgtattttaaagatgagacagcttggtcaacaatgttaagttttttagataggccgtggtatagacggcttgtaaagcaagagtggattagctgggaaattgttgcgaataagaatgagatacgttattttatttgggttcctgacaagaatatagggggtgctttcaaaagcaagtattatgctgaacatcccgaagtagagatagtggaggtagaagatcacaacattgatttttctcgtccgcatgctggaactaagctattcaccgagagtcactggacagttccaattaaaacgtatcacaatgaagtcgttgatactcaagcagagctagttgagtttttcgacagtttggaggaaggtcaagagattcatatgcaatttcttgttcagcctgcctatagaactgaaaaaagtttcaggggtattgtacgtcaattccataagcaagaggaagcggacggaactcttgagaaggataatgagttatacctttcagctatagaagggaaatcaacaagggttctttctcgtttgggaattaaggtcgtagcgattggtcgcagcaagaaggatgcaaaagatttaattagaagtgctaagggttctattggcacgttttcaagtggtcggttaaatcgactgaaagggcgtgagtggtggtggtttagcactgttaagccattgttccggtgggagtttaaaaatcgacttttctcaattgaacgaatgaggaaacgtgttattttgggtactgaagaaatggcagcgattatgagactgcctagtgaaagggtacagaataataagttgagtcggttgaaaatgaggtcaacttcgttgccccaagagttaaaaagaccgaactttgatcctaaccttacgattccattaggggaacataactaccatggaaaatcgacaaaagtcatgttcgatctagcgactctacgttatcatgccgcttttatgggcatgtcagggatggggaaatctacagctatgtataacttggttgaggatttaattaatttggacggagctggggcatcgataggtggtactgtcattgatccgcacggggatttatgccaggacatagctgcacggattccgccggaaaaacaacatctggtacggtatatcaaattttctgatgggaatataccgtttaacgtttatgatgtcgattttgcttcaagcgaggacaaaattgcccaaactgttgcggatgtacttaagcgaacatggaaggatttttggggcccgaatattgatgacaactttttaaatggcgggattgcattgcagcggatcggcgaagcaagtcttcctaatctgcaaaagttattgagcgatcctgattatcgtgaaaatgttctggaccgattagatagaagtgatccaattgaaaatgatctatatctctattttgctaatttgcaagggttagaggatagagagcttcaaccaaaaattaattcaacactgaataaattgagaaagatcaccctatcaggtgtgatgggaaaaatgcttagggcaaaaacgaacggactacgattccgggaaagtatggatcaaggacgaatcaacttgttggatttatcagaactgactagtgatgaaaaaaagttgatcggctctatgtgtttgacatttgcggagcttgcaggaaaaagtcgagcagatacaccaccagaggagcgggataaacttccatatcacttcgtgatggtagatgaagcgcccacacttatggagcatagtaccgatgcaattgaatctttcgcttcagagcttcggaaatataaaacctcaatcattttaggaatgcaaggattgaaagggcaagtgccgtccgaagtttccgatgccattttcaggaactttggaacttttgtttcattcaagttagggaaccctgaagatgcgatgtttgtaaatcgatccatgccatctgaagttttgaaagatagtgattatctaaatgtagagccctatcatgcgtacatgcgtatgcaagtagggaatgaaaggacgcgccctttcttgttacgtatgaaggctccagggccggctaaatttaaagaagcgattccttatattaaagaaagaacattaaaagacgctgtagagtacgaaaagcaagtgctttcttctgaggatcaggaaactatagaagtagaaaatgaagagggatatgaatcatatcttgtatctgaatttgatgaagaaaagacgtctgtagatgctcaggtaaatgatactgagacaactggcgaggaaattaaaatctcttttgaagaagaagcaaaagagcaagaagtggacacattgaatgatttacttgaggagggtgttccgcaacaagaagattgcactgctaattctgatgcttttgatttattggatgacttagatgtaattccagaagagactgatgaagaaaaacagcatgaagctgaaagctcagattctgaagaatcttctagtagtcaacaagatcgggaaccgaggagaaaaagagatgataaggacgttagtattgatgatctgttagtgtagggggggttaaattgccaaaacgtatcggagagcttgaggaacagttatttgtttcactacatgatcttgtattcatcgatgtggagtatttggaaaagtttatttacgtccatcctgaaggtaagccttatacaaggggatggatatcacgacaaatgaaatcactcgaaaacgaaggttatatcaagtcgttccctgtagcgaaggctacagcgagagggaacgatcggttggtatacaccttggatacaaaaggtgttcaagaggtaaaagaaattcttggtgatgctgattgggatgctagatggacgcagagaacacctacatatgtgtatcattccttgcgaatgtcacatattcaagctgcctacgcttcacaaaaagatgatttgtttacatttaaggagttcttttcggaacgacgtgcctttcggaattacggggaagttcaaaaaggtaaagaaaggaagtcagctagtaccgttatacgccccgatggggctttcgtactagagagaacaatccatgataaaagtgttcagattcttttctttgttgaattggagcgtagtcgtcaacgtattgatgtcaccttgaataaaattcggcgttacaatgaatatgcgcggaaaaaagcatttgaggatgacattatttttggggattcaattaagatcgtacggattttattcgtgtccaataatgagactgaacgtaatcaattgctggaaaacgccaagaaagcagactcaagagaaattcaaaagatcggtggagctttgatgttttctacttacgatgatgtgattaaaaacccgtatggcgctatttggttagcggctaattcttccgatcgtgataagttatacaatctttataaaaaagttgactcataattcgtgagtcgctagattgatagcagcatcaaaaaagcagcctattggttgcttttttgatgtctttttctgtttagttagcactactatactaagacttttgttcgtgtttactcttgttggtattactagtatattaatggtgtttattcgttatcgaatcaaaaaattttttaagagactctctttctttatcagttaacttattaatttcatcaactaggggggtgatgttcttaagaagtggcatgatgtttacagagagaagtgtgtgaattgtttttatttcgttttctgacatttgatttaaagtggtgattaatcttcttttttctagctcatcaatattgggtaacgcgtcatcgggtaatatatcaaaaagtgttatctctaaagcattgcaaatcttaatcagtgtcgcaatgtttgtagatgaataaccattttctattttactaatggtgccctgagaaattcctgaaagtttggagacttccgttgtcgagaggtttagtgattttcgatatttctttattctcgaccctatcgacttgtttaatttatccatgcatttcactcactaacaattatttttcattatcataccagaaaggagaaacatgtttaaaatgtattccttttagaatatttatgttgacattttattcgttatcgaataaaatagtcttaagggggtgacctcaatacacattattagaaaaaaaagaatagaaaaaggttggactcaattcgagctatcaagaagatcaggagtcccacaaccaacaataagtcagatcgaaagagggaatagaaagtaccctacatataacactctgataaaattatgtaaggtactggaaatcgagatcgaggagctcgacaaggagaatgaaaggaggtgaaacattacattggggtataaggttaagcgcggatcgaatcctacagacaatacaataaaagatatggttgttggattcattaaaaggttaataggcgttgtattgatattggctttaattgttgtagttggctacttcttgttccaatttatgtacggacgattcgagccattccgtgaagccgctgacgatgttataagctgggtttccgttttctacaaagaaaatggtgtttgggctactcttggtgttatcgttcttgtctgtgtggctacatgggtggttggagaagaagcgaagaaaaaagaacgtcgaaagaaagctatggaagaaatgatgaaataggtaggtggaaatgatgagtgaacagccagtttatttcggattattgccaggtccttcttttccaaaagggtataaaagcgagaagtcggtattcattggtaaaccaggacctggttgggaaacaaacatggcacaaattttggctttccattctcaatatgaagactccgagagggaaggaaaagattagtggttgttgatcctaaatttgatatcaatgaggagggaaggcatgaaaaaacgtgaatatccgaaaacggtattccgaaaaaagctaatcaaatcggttttttggctgggttttgggttagtgtttttcctctcgattatagcagttgttcgagtaggtaatgcaactgttgcaaaagtagaagagccagtagttgaggaagaaaaacctgaaaatttagctgcaagtgcaggggcggcaacattcgctcaaaatttcgcgaagcagtatttcagctgggatttgtcttcggccgaaggcagagataaaagatcccaagctttagagaagtaccttgcggaaggattagatgatcaagccggactcgcgtttggagacggagaagaaaatgaccagtggaacagcaaactcactggatcgcaagtttggcaaatagaagatacaggacaaaatacatcaattgtgacacttcgtgtagagcatgaactgtcacgtaaggtcgaagttgaagtagaagtagaagtagagggtgacgatgacgaagacgacaaaacagagattgagattaaggaagaaactgaaacgtcggggccacatgaaaaatactttgccataccaataaagacagatgggcaatcgtttgtggtttacaaaactccttactttgtcgctgcaccagaaaagcctgacatagaagtagaagaagatttgatgcaagagggaagaattgtaaatgtggaattagaggaagaaattaaggccttcctggaaacgtatttcaaagtatatacgaatgggacaaaagaagaactgtcctattatgtgaaaggtgaagaaataccaagcctagctggaattataaccttcgaggaagtcagggaagttgcaataaaagcggaaaatggggattttgaaggtaattctgattcgtacgaggtgcatgcaacagtttcctttactgaggatcaatctaaaattaaagtcatttatgactttgttttaactgttcaaaaagaagacgatcgttggtttgtctctgatatttcgaatttttaaggaggatgattaattatgaattttggtcaaaacatacaatcatggtttagcactcaaattggagcgttattcttagtcattattggtgctgtagctatttacttcctggttaaaagggaattttcacgctttgttggatttgcagtctttgcgttaattgtaagtgtatttgtattcatgccgcaacaagttcgtacacttggacgtactttatggtcaacagtttttgggggctaacatgaggactaaaatactgagaacgtacaactctgtatggaaagtcgagaaagtgttgtacagcattcaagacatacccctgccgatacccgttacgtatcggcagataggcttttttgctggaggggttgtgttagtctggttcctaaatcactttcccccactaagtttaattgatctagggttgattgagtatgtttttcttccaggactatttgcttggttttttactaagcagaaattagatggaaaagcaccgcatcgttttttcttgcgaatgttagactatcacctttcgcctcgtttgagaaatcgatataaagaagtttcggtgaataagatctatcggtacaccaatccaatagggtatcgagtactaagttataagaaagaaggtggagctgatgaacattgaatttccaattaagtattttgaagagaaccttgtcttttctcaagatggttcttgttgggcttattatcagctctttggatacaattacgactttttagccgacgacgagaaggatttcattttcacaaagataaaagcgttcttttggcaaataaaccttgatactcatatgttaatcgttcctaactttcagtcgatccaggaaaaacatgaaaggtttaaggcccgacttaaagggcctttgcaagaggctgctgttaaacatacagacgatgcagcaaaacaattagaaagactgttaggcaaagaaggaacagagtatcaattctacatcggtattaaattgcctaagccagaaaataaagcaaataaaaaatcgcttttgaaagatataaaagaggcttggttagagtttattggtgcagtcaatcagtcatcaggaatggacacaggggaaatcgttgaagatgaaatcgatcgctatcgtaaagctgatcgacgagtttacaacaaagtacactctaggctgagagcagaaccagtcaacgaagaaacaatacagtggcttattaggcgtaacttttacagaggcattggtaaagcgcctctactaaaagattggagtcctgcttattcagtaaactataaagagtttgaggaagaagaatataaagtacgacggcctttatatcatgatgtcatacgattgagtgaaggcttagtcgatgattctcctaaacgcagcttaatcttgaaacaggttcatgagggagaagaaaaagaagggcatgttgcatttcttgcagttgccaatgttccttacgaattagagtttccaggcgaggaatggatgtatgtaatacaaacactcgattttccaatcgaaatgagcgttagaacggaaacgatggaaaaccgaaaagctctatcagcggtgcgaaataaacagaaggaattgaaagaccaggatcgacacgcgagggaaacggataatgacactagcttaaatgttcttgagggaaggcaggaagctcatgaattagaggctcatttgcaaaaatcaagaatgccattgattaaaacgtctattatcctttgtatttcagccgaagatgaagaagagctgaaacgcagatgtgacacagtgaaagatttatatgacgatatgatgtttcagattgaacagccttatggtgatcaatggctagcatttaatgagtttcttccaggggcgaaacgatacattaaagattatgtccactatatggagccagctgccgttgctggtggaatgtttggggcaaccaaacaattaggtgatggcgaaggtttctttattggatcgactggtatccttgatcaacctgtgtatattatgcctaatcgcgcggcgcagggaatacgagggactaaaacaaacgcactatcagctgcatttctcggttctctcggaggtgggaaatcctttagttctaacctgattacttacttatcggtattatcaggtgggaaagctctggtgatcgatcctaaaggagagcgtgggaattggggacgagatttatacgatttaggggatcaagtaaacatcatatccctttctacaaaaggtgaagacagagggcgcttagatccattttcaattcacgaggatgtgaaagaagctgaaacacttgctcttgatattttgacatatttaacaggagtaaggttggatgattcagaaagatttccgaagctgacgcaagctgtacgccagattgcggagggagaaaagccttgtttaagtaaggttatggattgcttgattaacagtaatgatcaagtatctaaaaggttaggcgagcatatacgatctttcagtgaattatcctttgcacaacttttgtttggcgatggagaaaacgatgcaactataagccttgagacggctttaaacgtacttcaaattcaaaacctggaattgccggcaccggatacgccgcaggaaaaatacaatctttcagaaatgctttctgtcgcaatgatgcttccaatttcatcatttgcattgaaatttgttcatagcgatcgcagcatttttaaggttgttctgcttgatgaagcctgggctgtattaaatacatctcagggaagccacttggccacacgactggttcgcgctggtagggcgatgaatgctggaatttatttcgtcacgcaaaacgcagacgacttgctagacgaaaaaatgaaaaacaatctgggtatgaaattcgcttttcgaagcactgatccaaaagaaatcgagaatgtcctttcgttgctaaatcttaaaaatacagagtacaacgcatcgactttgcgcgagcttcaaaatggacaatgtttgtttcaagatatcacaggtcgagtgggtgtagtatcaatcaatgcactatttaaagacttatttgatgcatttgatacacgtccgccggaggagaccgaggaagtcctagaggaatcggaggtctacgtatgagaaaagtggctttaagtttaatgattattctgctcgctgccgctggttgtggcagcgaggggagtaaagaaattaatggaaaaaaagctgaagatattccggtagagtgggctattgcaatgattcagcgagacgacgcaaagagattggacttacttgtccaatctacagaagcccttgatccagaaaaagggccgcaaaatgaagaagaacttgatagttaccagttaacagaatggaaagcttctgaagacaaatttttttacgaaattaagtttgtcgatcctgtagcagaaagcactcctagtagacaagagcgtatggaagtggtgagtactgaagacggatggaagcgaacacaatttggtaacttgaaaaattttgaaacactcgtcgaggatatcgaaagcagaacaataaaggagttgcatgaagaatgaagatagttcttcgtacactcttcataattatgttgttgtttttaacatctggacttacagcttccgctaatatccaggacagtttagttccaagagaggaagataaaacgagtgtaggagaagtgcaactcgattataacgagtaccctcaacaccattattatttagactcgtatattgatacgagtggggactggatgccttggaattgggcagagggagcaggaaaacagatattcatagctctagcagaactaactaattctatttggcaactaaatgtattgctggcccactttacagggtttatagtccaagaagcgtttacgcttgattttgtatcaagtgttactaacgtgattggaaaagcaatacaaggtgtagctggctttagcaacgggtttcattctgacggcctatggccattattagtaacgttcatgctttgccttgttggaacgtgggccgcttacgtaggcattgtaaaacgagagactagtagagcctggggaggtttaatatcttcgctgattgtctttgtattttctcttggctttttcgccaacgcagggacaattttgaaagaactaaatgattggtctagcaatattcaaagcaatatccttaatgtatctgcaagcatagtaaatccagggtcttcgtatgaccaggatgaagggatagcgtcaattagaaatcaaatgtttgatctcatggtaaaaaaaccatatacaatcttacagtatggttccactgaaatcgaacaggaacgagttaatgagcttctctcggtcgatcctctccgtgatggtgaatcgagagaagaaatcgcaaaaattgaagttgaagatcgagacaacgcgatgatgggtttagggggagtttcacagcgagctgcttttataccgctgctttttatcgctaatactatcattggtgtgttttcattaattgtttcgggttcgattattctgtatcagcttgttttcttggctcttgcgttattcgcaccagtaccgttattgatggcggttgttcctcgttggcagcaaagcgcggtagtatggttttcaaagctggtgcatgcacagctcatgaaaattgctattgccttgctcttaacgattttgtttggtattagctctatactttatcaagcaacatcaaatggcgatataggttatttggggatgatgctactacagattgtgtgctttgtcggtatatggtcaaaacgcaaagacctgtttgggtcagtgactcaaacagtgtccaacatacagagcagcacaggagaaaccttgcgtaattaccagaacaaatatagacaggccaaaaatctttttaataatgcaaatcgtcatttgcatcgtggtggtaaatcaaacgcacctttggctgatagacatggagataattcagctgcaactggtaaaggaaaagatagtcagactcggaataaaaaaggcctcaagggagcaacagctggggcggcagctgcagctggattagtagatagagagcagttggaacgtgatgaatataaaaaacaactgcacagtagaccaaatgtagaaaatgcgccaacaactgacaaagataagctcttgaatcgttctgaacttcaggaagcgaagactctcaattcagaagtccaaggggataaggaacaagaggttgccgatcgttctgaacttcacgcggataaagagcgtacattgctcaaagacaaggatcaaacgttatctgatcgtacccaagacaaagacagcaacaatgtaacgcacatcgatgatttacgcaaaaaacgacttgaaaaaggcaagctttcagaagctcctttggcagatcggaaaaaattacatgatgcatcgtcagagacagcatctgccattgaaaaggctgatatgaaagacgctaatctggagaatcgttcagactcttcacgtaatgtaaatttactcaacaaacaagaacataaagacaaagtaaatgagaagcaagacaataaaatctttgaacgcaaaacacttgaaaaaggaactgaaaaagatatttccagtgacaacgttaatagagagaagactcaagttaacactaacgagcgcaacgatactgttgatcagaaaaatgtgaacaagcttaacaaaatctctgaaagagagacgctccaaaacggaacagagagggacgtttcacaaaagactagcaacagtgtcacagacagaaacgtaaaagaaaacataagtcaaaccacgagaaataacgaaacaattaatcgccagaacatccagaataacagtaatgaacggaatgtaaccgagactgtcaaccaaacaacgagaaacaatgaaacgattaatcgccagaacatccagaataacaataatgaacggaatgtaaccgagactgtcaaccagacgacaagaaacaatgaaacgattaatcgtgagaaagtccagaataacactgtggaacatagcacaaaagaaacagtcaacaacatcacagaacgatctagaaacaatgtcacggacaatgtgacaaaaaatgtttctgaacatacccaaagaaatgtaaatgtgaatcgcgagaaagtaagtgcagataggatcatcgaaaatgtgaaaaactcaggtaaacacttaacaaaatgggaggcttcgcaactagcgaaagccaacgaaaaacctgagaagaaaacaaaacctaagcggaaaggttggttgagaagggggtaaaggatgttcggttgggactttgaaaatagcaaagccgatagagtcaagttgtttctctttttgtttgtgattttccttattgtcggcttttcagcgagcttaataatcagaagtttatcatcagatgctaacatcgatgataataacgaggtaacagaagcaaaaggtgattcggaggccgattcgaccttagaggtcgatttcggttctgaagaacccgtagttgagaacgagcaagttgaaaacgaatttgaccagacagaacattttagtgaagagaatcttgaagagacgaaagaaattgcagttgattttgtaaaagcatatcacagttatgattcagataatccgtcggattatctagaaaatgctcagccttacatgacggaagctctttatcaagagttttctgcacaacctaggcgagagacgctcgaacgctcatatttaacggtaaaagaaacccaagtgacaaacgtagttaattcaagtagcagagtcatacggtggaatatcatcgttctgggcgaagctgaatctgtagatggagagatttcggagacagaggactggtatttagttggattgcgccaggttgatggagaatggaaagttgaggatgtgagagttaatgtcccaaactgatcctaacaatgatcaccaaacagaaggtagttcggcactgaaaaaagctgctagttcagctgggaaagcagccacaaaaaaagcagtaaaaacagctgctaaaaaagcagcccaaaaagcagctggaacaactttgctcgctaaaattgggtggccaattattttaggagcattcctgttattgctaattgctggcgcggcattaataataatttttatagccgcaagccatgaagagagtagtccacaaccaggcggaggattttgggggggagatatatcggagttagcagaaaacgaaattccagctgattttatacccatatataaggcagcagaacaagaatatggggtgccgtggaatttattagctgccattcatagagtagagacgcatttttctacaatagaccccatggtttctcctgttggagctgtcggacacatgcaatttatgccttgtacatggcttgggtgggggcatccaagttgcggcgggcttggagcaggtaacatagacaattcgcagctggtaaatgtgtctgtaataaataaatacggagggtacggggttgatgcgaatggcgatggtaaagctgacccattcgatctcgaagatgcaattttttcagcggcaaattatttagctgcaaatggtgcagctgagggagatttcagaagagcggctttcgcttataatcgcgccgattggtatgtcgaaaaagttatgggatatgctgattcttatgtttcagggtatgttccgatcggcgatggcggcggaagtggaggaaacgatgtagtcaatgtaggtaagaagtggattggaaattcaaaatatgtttttggtggaggaagaaatcaagccgatattgcagctggtcgtttcgattgttccagcttcgtgcattgggcttttgcacaggtaggtgttgatttggggccgttgggctctacaagcaccgaaactttgaaacatctaggaacgcctgtgcctccaaatgaaatgaaaccaggcgaccttgttttttttgatacttataaaattgatggccacgttggaatttatgttggtgacggtaaatatatcggtgctcaatcaagcacaggggtggctatagttgatatgactaaaggatattgggctaagaccttcaatggtcgcgtaaaaaggatttgataattgtagagcagggggattcctgctctcttttgttcaaacagggtataccctgtttgaacaaaagagattgcagtataatcaaggcatagaaatgttcaatcagatttgttcaaactaaattatcagaaggagaattgaaactatgatctttggttatgctcgtgtaagctcacaagaacaaaacttagatagacaaatagaagaactccaagcagttggatgcgataaaatatactttgacaaacaatcaggaaaaaatttttcccgtgcggcttttcgagagatgcgttcaaaaatgaggtttggagatgtccttatcgttcatgatttgagtcgatttggacgaaataagaaagagatcaaaagagaatgggaatccctaatcgctgatgacattgatatagtcgtgttggatatgcctattttggacactaggaagtacaaagaattagaaggtatcggccagttagtaagggacatcgtgcttgcgcttctggcatggatggtcgatcaagaacgtctcaatacacgtaaagctcaaagggaaggtattgaaattgccaaacgaaaagggaaatataaaggaggaaagagaaaataccatcctggagcaaaagggaaggacaaagtcatttatgatgaagttgttaggctcctaaaatgcggtgagagcgtaatggacattcatcgcgcaacaggattggccaggaatacaatttattcgattaaaaaggatctaatacacaaccgaaaggaagacgattaaatggatttgtcatggaaagaaaccaaaccaacaagcccatttgggcggcagcactacagactgatcggaaagcatacttcgctttccgtcattctgtacgtgtcgcttcggcactaaatgactcgataaccacggcctgtaagctnnnnnnnnnncaattaatgcgaataaatttgattataaccgaatcattgaagaattaattgaacctgtagcggactttgctatttcaagaaaagtaaagaagtcatattctaacaaacctatgaaactttctaaggtggcaagagaaagatttgtggaatataaaaaaaatactggtgaacttggagagtttcttttatattgttttttagaaggacatttaaatgcacctaagatattctcgaaattagaaatgaaaacttctacaagcatgtatgtaaatggatcagacggagttcattttctgaaaataccggacggaaattaccaactagtttttggggaatcaaagacaattaaaggattaagaccagctctgaacgatgcttttaaatcaatctatcaattcattactgaagttaatgataaaggtgcagcaaaaagtggaattaatttcgaaaaaaggttaataagtgataatcttgatcatgaaatttggtctgaagaggaaaaaaagttcttaacaaaactaatttatccaacttctgaagaagattttaatgtggatgacgcatttggtatttttgttggatttcaaataaatttagatggcgaagaaagaaagttaggtaataatgaatatagaaagaaagtagaagcatttgtaaaaagtcaacttctcaaggaattggagcaaatagaacacttaattaataaatataatctatacggatattctttttatgtatacgctctcccctttactgaacttgacaaagcccgagaacagattatgaaaggactaacaacatgagtttccttaatgaacttgctataaaagcaatcaatgacccatatttagaaacgttaatttctaaattagaaaagatatatggttacaattttgcaggtaatactataattaaattaaatggaaaagaatacacagacttattaagatttagcgatatactttgcaggtcagatttaactgaagcaagaaacctttcgtataaaattattagtttattgtatgacttttattctgaagatatttttttcaagatgcaagctacaactgttttagttaaattaggtaacttcccttctcttaaacttgctattggcagtgatgagtttaatttagatgaaataaaggtagaatctataataaaagaaacttatcaactggcacctgattctaaaaatatatttacnnnnnnnnnncgttaacaagaaatgtttatgtaacaacaattagttgcttttttatattcatagtcttaaaaagacctacaaaggttaaaatatctattcttaaaattatttttatgacgtgcatttttctaggtgtcatctttgtatatattgcagaagacatttttcatcttataaataatctaacattttttgatttacaatcaactaatagtagaataaagggatatcatgaaacgttatcacttttaagcaatgatgttaatgatattatctgggggcatggagtcacttcccaagatttagcgaattatgtaatagataatgactttttatacatatatgctaatgcgggaattttaatatatgtaataactattattttgtatacctctattttattcaaaggactcaatggtnnnnnnnnnngcgtttgattcccttgtttttcagataaaaagtcatagccaaattgacgtgctaacttttccacttgtgcagcaataagagctgtaatctgttgattgtctttcataagcagtatttctccttacttcatctcattagggttttcttcttagtatactataccttaaacttttggagctaacgacttaacctgtacaaatcatgaccacatgtccatccggatcttttatggtaaaaaacgaaaaatcttcaaaagaagtaatcggagaatcaatcgtatagtgcagccctttaacaaattcatacgcttctttaatatcttcagtatgaaaattaaaaattggatggagactaaccgctatttgtttttcttttccttcaggacctgcgtctagcgttaatcctgtttctccatcaatgttaagattataaactgggttcttaacttcgctgatcttgtattcttgnnnnnnnnnntaataatataccgttaggtaagctcattgtaatttcatcactaggttgtataactgtcatgtttattttattcttcttattacactctttgggcaaaatgacaggatttaatttatctagttgcaattgttatagagtaagagttagacctagaaaaaaagggatattgggtaggatgtttgaagtatttgaaacgaatagcgaagaagatacttattgtaaatgctctcccatcgaaaaatatcctttattaatatatgttacttactttctgattacgatggtattgctcggaataatgataatgttgtggacaagtaatgaagattacttagagtttttacaaacagactttggtccatttgcgtcaagtgtggtattgattatggtaagtggattatcgttggcgtttatacataagaaatttcttggcaaaaaaagaataaatggataaaatgaccttgcttattttgcagggtttattttatttgtattgaaattaattttaagggaggcttgccatgaacaaaaatacaactgcttactcacttctctttaccatccacgatcaccttgccaccaaacacaatgttccatcccatatcctggactcctaccgatacaccattgcttatgtagttcctttttactcacctcggattatagagctccttaatcaaagtatccgcattcgcaacaaagtttgtcatttccaaccgacttctcaaaaagacattaaaacgcttcagcttttatgtaatgagcttcaagttcctttaacagctaaaaaggtaagtccaatttattaaatttgggtaaatacacttgggaaaaccttctgaatgattgtatttgcgctagaaactattactcttaacttgaaatcattaaagttaggaggaagtgaattttgaatcagttaaagaaacttgctggaattattgttgtcttcgccattctattgtttagccagccagtagctgctagcgctcaagtcatcgtggactttttggatgttgggcagggggacagtacgttagtgagagcaggggaaacgactgttttgatcgatacggggcgaaataggtcaactttagatcagttagaggatcggggcgtagttgatttagatttgctcatactcactcatgctcatgcggatcatatcactaatgctgatacaatcgtaaaggagatgtcccccgccgaagtgtggatgtcctccacaccggcaaattctcaggtttatgagaggcttcttgatgctctaatcgagacggatactcacgtggaatatccaacgacaggggattcttacgaagttggttcactagattttagtattgtgcatccattaagtctgataggggatttaaataatgattcactaagctttcaaatggttgcagccaatacaagctttttgttcacgggtgacgccgaagagcgagctgaaaacatgatgttaggcactcgtttgcaactacagagtgacatttaccacatgggccatcatggctcgcgcacctctagcagcgcaccttttatgtcggctgttaggccagaggttgcgatttactcagcagggatcaacaatagctacggacacccccataaagaggcaattgacagagtgcgtgccgttggtgcaactatttatggtaccgccgagaatgggacagttacagtgaatgtcacgaatagcggttacacaattcagacagagaggtaagatataatgaggtttaaagccgttattgataggattgaggaagacatagcaactattactattaaggattcagacaatgaatatgagataagaaaaagtgagttgccagagggttcgcaagagggtcattggctgttggtagaaattagcgatggaattgttaagggaatagaaaaagacctgcaagagacagaggcagctaaaatgcgaatccaagaaaagcttgcgaaactaaacactggcaacaaaagcaagtttaaaaaatagctttccgatgcctctactcatgaggtgcggaggcttatggtgttgattgccccgtgtgagggttgtgggtatgagagagtggtaatggccaattgagggctgtcaggaaaccaattaagtgatatgttactagaggtggggaagatcaccaaaaggcttgagaaatgcatatcagaaaagcaccctcgctggatcaatagcgagggtgcttatttttttaaaaaaggctatcttctctaggataagaacgataatacatttccgcactgcgattccaattccaaaatactgatccttgtgaaagaatgtatctctccagaaacatttcaaaacttgaattcaagggtctaggctcaccaacatcttccaaaatataaagatagtttggatttctctctttaacctttttcttattgataattaaatgacactcttcaagtagaaatgcaatagggatgtctttagtgtcaagatacttctgagcttcttttatttgatcnnnnnnnnnnatacataccattccatcaaaccagtgagcagatactaccgtttcaactgagtcagcaatgatttcacgacttggtaatgaataacgcataccgatatgtcccatcgcaataccgtcatctacaccgatagtgttcatttcaaaaggtacgccaccagcttcgcgaatcgcatcttttacgattttaccaaactcttgtaagtgaacatgacctggtacaatatcaatatatgaattgacaaccgcaataaacggtttgccgaaatcctcttcttttacaccagctgcacgcagtaggctgcggtgcggtgctctgtcgaatccttttttgatcatgttacttcttaattctgccacaataattccctccgtattcatctaacctattaaaaactgaatctttttaaatnnnnnnnnnnacatagaaatgttcgtttgaacaggaaggttttttgctatattcataagggttcgaacattttgggcctatttctcatattgtattaggtattcataatttatggccctagaaaaggggaggaatcagctttgcaacctacagagaaagtcagggttaatataccatttccatcacgatggggtatccatgctgagatagcaggtagaccgatggtttggggtgtgcttattattaactccattacaggtaacagagtaacgggtacaattaattttcgtggcactcttattcccattaatggatattgggatgagagtgccaaacaaatcagctttgattcaccttatgccacatattctggtaacttaactatgtttgatgattcgactactagaattcgacnnnnnnnnnngagatgcttttaccagcttccgccaccagttccaccaaatccaccaccggagaatccgccgccaccgccgccggacccaaatgagccaccgcccgatgaagcggtaggagctgggattgaaaccattgaagattgtaaggtattcatcgaacggctcaatgaatgccacatatagtaggatgtaaagttaggttgagatgaaatataccagtcaggctgttgaatggcaattgattcaaatttctttgaccaaacatctgtgaccccaagtacatatgcataagggagaatgtcatagaatatttcgggcgtctcttcaactaacgcttcaattctactttgttcagcgacttcaataaatcgcttgagtcctaaaatttgtccgtaccactcagaaccaatctgagttcttctccccatatttgcaacactcacaacactcactagataaaaaacataagctannnnnnnnnngtcctgatgtccaagatttaacaagagaattgcatgaagaaaaagggtatacatcgttcgtgtatactccggttggatttatcgcagaccacttagaagttctttatgataacgactatgaatgtaaagtggtgacagatgaaattggggctgattattaccgccctgaaatgcccaatgcacagcctgaatttatcgatgggttagctacagttgtgttaaaacagattgcccgctaagtcaatatagattctttgtacattgaacagggacgaaaagtaacttataatcaatatagagaaaagtaagaagcgagctatggatttccataatcgcttctctttatattgaattttacagaaaaggcgatgataacatgacggatagacgaaaaaaggttgtcatcatcggtggaggaa
